United States Patent Application Publication US 2026/0191916 A1 - sequence listing, part 49

SEQ ID NO: 214 - DNA, 3240089 bp, Enterococcus gallinarum (residues 1,620,046-3,240,089 of 3,240,089)
  source 1..3240089: mol_type = genomic DNA
cgggttattccctatgattctaaaatcaccagcatgccaatgggacatatggtagaagctgcgttggatctgaaccaacaaggcaaaaccattgaagagatcgtgacccacatcgatcgcatccgcgataatacgtatgcttatttgatcgtagatgacttaaacaatctcgtgcgaggcggacgtttaacaaatggtgctgcattgatcggcggattattgaagatcaaaccgatcttgacttttgacgaaggaaaaatcgtgctttatgagaagattcgttccagtaaaaaagcttttaatcgcgcagaagacattattggtcaaagagaatcagaaatcgcttacccagtgaaattctatgtgatccatgccaataacttgtctgtggctttagaggaaaaagcaaagctgcaaaagaaataccctgatgccgaaatcgaagtgggtcattttggtcctgtgattggttctcatttgggtgaaaaagcgattgggattgccatcgcagcgcaataataaaagtgagttatttattcctatgcaattatttgatttttataaaaatacctatgttacttagaagcttgtcaagggattccttttgctagtttctggtcacatgggtatttttttgctttaaaagcatcttgcttgtttatctgattcacactgactatacttaatccaattactactttagtaaattactaaacaggaggatggaaaatgaaaataccagaaaacttaaaacacaaacccgtcatcaaagttgaagactatgatacagtagatggacgctatgcgcttcatacggatgcgaaaggcttatcgttgggtctggcacaatggaatgatcgaggaaaagtagatatctcagggaaagtatggcggcacacgggggaaaagtggtctcgtcaatcagaagaactcccattatcacggattcttgacttagcgatccttgtcgcgcaatctagcctctattttcaagatgcctatcgtcatgaaaagttttatgatccagaaaacccactcatcgatattattggactgcaaggaaatcggatgacagtagaagttgatacagacaatcctaaaattgatgaggatattctattgttctatgatgccttgcaaaaagatggtgaattgatcggtgaacgttttcgaattttaagtcggttgttaaacgaattgggctattaagaaaggaggaatctacatggggatcaatcgtaccccttttactttgacagaaggtcgacagttcagcaagttagaacagcaaatgatttggagcaaaatgggatgctgaatctgccaactggcgttgtcaggcgccatccggattgtgtcgtcattatcacgacaaatcggaactatcagggcaatcgtccattgaatgaatctcttagagatcggatgcaacatgcagaaaaaatggaccttcctgaactatctgtgatggtcgcacggggacttgctaaaactggctttcaagatcaagcgatcgctagcaaaatggcagagattattcgacttctcgatacttctgcacgagcaaatgccatcaagggtgtggctggtatgcggtcttatttttattggctgaatacggttaaaaatgggcaatcacctttaaatacgttagcggtcaaagtcttatacaagttaacgacagatccagacgaattgcgcctgctgcaagaagccctcgatcaatcggaattgctcttagagctaagacgtttgtatcaaggacagaaaatgagtcatcgacaaccaatacaaggacgcatcgtatctgctgaagaggcggatgcacgaaatattgaagaagcatccttgcagatggggacagcagctagtactgaagaaacagcagagacactggagacacctgaggtactagatacagaggaaacaaaccaagatgatcaggaagcggtgcctcaagacactatagatggagactctttagagagccaacattcgtctgatgtgggacacacaaaggaaggaagtgaacaatctgctcaagaaccttccagtcagcatctttcgatcgaagaattcaggcaattggataaagaagtaagaaaacaagcaaatcaagaagcgcggcaagcgctaaaacaatctatccatgcgaaagaaggattgattgtgcatcggccaaaactccaagaaaatgcttctcagaaagcccagcaacttctagcaccgttgttgccggtggttgagacaataacaaaacagttgcttgaattattagaaaatgaagcagcttcttcttatggcaaaggaaaatatagcgggacacgctttgatgcaagtcgtgttgcttatggcgactttcgaacatttgataagaaaaatcctcctcatgaacagccttcattagcgatcgctttacgaatcgatgaatcagggtccatggtacgggagggacggatcaccgctgcacaacaagctgcactcgcagtgagtgcgtttgcgcagcgcctagatctcccgctgatgatttatggcgacacagccgatttgtctgtacgagagaagacttctctctattcttataaggaatttgctgaaccttttgattatgtgccggcaaaactgatgtctcttcaaccccgacaaaacaatcgtgatggggcagtgctgcggatactagctgaaaaactttcccaacaatctgctacgacaaaattactattgacgattagtgatggtcagccaaaggcgatgccagattatacgggcaataaggcgaaagcggatattcaagcagtcatcaaagagtatgaacgccaggaaatcatctttttgtccgctgccatcggacaagacaaagacgtcatcaaagaaatctatggcgcggaaagatatatcgatatcagcaatcttaaagaatttcccaaacaattactaacactgatcagccgttatttctaaattacgatgcattcggctactttttaaataacatccgtcttgcatagaagtgggaggcggatgttatttgtttcttataaaaagaatatgtaaactaaattaaacgaacgttttcaatttctgcttcgtatgctaaactgatcacaaaggaggaacaacaatgactttgaattggcgttatatctatcctttctctactgcaggagcttatttcattcgaagaagaacattgtggatgagttatggactatttacatttgtgagttcgctcttatttttttgtgaaaagtggacattctttttttcgttggtatgctcttgaacggcgtttaaaacagacttcacaagacagttcttttcaaagttggctctttttactccttattttcctaggggtggtcggtattctatggatcggcatggcagttatctttttcctatatagtcgttcatgttacaaacaattccttttttcgaaggggaaaaatccgtgacgatccgatttttagtaggacaatcgcttcatttgatggttatcgaggagactcttttttccttgaacgggattggtttggctttttagattggcgattcattaggtgggattgtttttgaacgagcctttcatgattttagccagtttttatcagttgcctgctggattactgaatagcggttcttcagtgataccttgggcatggcatttactaattggtttgcagtggtcctaggctgttggcttggctacaggagccggttgcctgaaatcgtcaatcgccatgaagtaagttgatgtgaaaggataatgttctatcgatgagaaaaaaatgaacgagtctcgtttgcacttgcttgctaagatgatgacggctaccaacgtaaatcgtttcacttagaaaaccttgcaagcgggatctctagttaataatctttgtttttaaagagaaggggtgtttttttgtttttagagatcaatgctatttccaaaagctttgacaagaaacaaatttttgatcaggcaagttatcaatttgaaaccggaaaaatctatggtattttagggcgcaatggggcagggaaaacgacgttattccaatgtatcgctcggaatatgaccgttgatagcgggagtatttatttagttgaagacgacaatcaacgaacctatgaaaatacagatgtcggatttacattcacgcaaccgcatctgccaggttttatgacggcgattgagtttttgcgcttttttatggatgtcaatcgggagcgcatcaaacagtcgctttctccagaagaatttttaatgtctgtaggaatttcttcagaagagcagcatcgtttaatgaaagattattcccatggcatgaaaaacaaagtacaaatgcttctttctttgatggtgcagccaccaatcatgttgtttgatgaaccattgacctctttcgatgttgtagctgcccatgaaatcaaacaaatgatccgatcagcaaaagaggattcgatcatactgttttccactcatattttacagcttgcacaagatttatgtgatgaagtggtcctactaaataatcatcaattgaccgggattgatccttctcacattcatgaaccagattttgagaaagaaatcgttactttgctgacggagggggagcccgatgctgcaatggattaaactttattggctttatgaagagacgattttttcaacgaaagcgaatggatttctctattttttgaccaaaattcctttgattggaaaacatttgccccatgatctttatgggcaatacggtctcaaaaaaatgctttttactgtattatttagcttgcgcttgatcttgccatttttcacaaaaattatttggctgcttttttattatgcaattgccttggttgcttttcatggttgggagaatttatttggctcttttgatcagtttgaagaacaaataatgattgctggtttttatacttggctagtgggcgttgcactagccagcaattttttttctttgttctcatttacattagatcaaaaagcgattgaattcacggattacttcatggtgtcaaaacgacagtatttgcgaatgaatcttttctttaagacgatccaatccattatttattatctaccagcatttttgttgtacagcttttttgctggcaatagttggctgaccttcgttggtatctttggtgctggctttgcttgtgtggcagctgccagtctaattcgctggggattccaaaagcaatggggcagtggctggcgcatcggttggcgactagccatatctatgctgactttagcgtcgctctacggcttattgcttcaacagattattccaactatgacattcgggttgggacttttggcgttctttctgattgccggcactggctgtttttactacctaaaatactttacacaagaaaatgattttttcctttattctgttgaaaaaagctatcagcaatttagtgtgctagaaaccatcagttcagattcaagtcaatatctcaatgaagggattgaaatgcagaaaaaactttctttggatcaggagaagccactcactcatttgcaaggatcagaatacctcaacggattgctctttcaaagataccgtaaactgttgcgcaaaaaattgctgaaccgtgtcggtattgtgtctattctatttctaggattgattttattatcctttttgaagattgttccatatcctaatgaagaggatctgacagcactactgccagcgctatttttagttatgtattttggttcattgggaaaagcaatcgtccaaatggtttttgttaactgtgacatctccatgctttactatcctttttatcgggagaaagaaacgatcctcagtgggtttaattaccgttttatcaaatcgatgttttacaacggagtctttgcgggaagtatttttggcggcttcttattatgggacttgctaaatggattgcaagctagctggtatttcattggggtcttatttttattattgacgagtttgacagcattgttctcatttcatgaattatttatctattacttgctacaaccttttactggggacatgagagtggtcaatccggtctacaaatttgtcagtggagtattgtattggatcagctatatcaacctgcgcctgcatgtttctggatttgcttactcgatcgttgtctcaatggtcttattactctatgtttttgtcggatatgtactaatcattcgcttcgcgccgaagacctttaaaatcaaagaataggagagaatcaggactgcattataaaacctattcacaaatgcgaacatatgttttataatgagagaaagttgtgaataggagggtctagtcagatgaaaactacgttgactcttgaaatggaagaagccctttattattactgtcgcgaaaacagtgatatcgtcatcgaagaggtaatcatgccggatgatcaaggaatcgttgatactctaagttgtcgcttaacaccagaaaatttgtttgaatggcgctgttatgaattaaaagtcagcctggcggattttcgttcaaaagcgaagctgtcatttattgggcattataattattttgttttgccgcatgcattatatgtaaaggtcaaggaagagattcctgctgccatcggtgtattggtttaccatgcatttgctgatcaagaaaaggggagccctggttattttagtgtcgagaaaaaaccgcagcggcaatctttactcgtcaacgaaaacgcattgttgtatcgtttgatctctgcacaagcacgagaagtggggaaggccaagcaaacagcacgaggtttgcgcgttttctcgacggaacgattgtacaaagaactaaagaaaaggaaaccagaatacgatttatttggcggcggggtcaattactacgaccgttttattgcagatacgcagctacaagctattgaagcgctaaaagaagaactggctgcaacgcgagaagcttatttcgaattggaacagcgttttttgacacaagaaaaggagtagcactatgtattatccatattttcgcggcaaacaatttgacttgttggcattaaaaagtctattagaaatggaacagctgtctttagaagttcaacccgtcattgagcctatccggcaatccaagactttttgggatacagtcgagctgtttcagaaaaaagcgcatcctttttttgttatcgtcaatccacaggcgggggactttctgacggaagaaggaagtcgtttattacaaacactgcctaacgctaaagcctatatcatcgatcagccaattgaaaccattgactgtcagccggacctttgggttgttcatgaatctgctccagcgttggccagtgactggagtaaaaatcagacaccgatcttagttggacaagaattccgtttattgaaaaaaatccagggaccaaagattctcatgcatgatttttttactagactgcctagaaacagcttctatcaggaagtaccagaagaagtgctaccaaccgtttatcaacactacgagcagcaaggattttccggctatagtgatttttctatcgacagcaaaatctattatgcacatagttatccctctaaaacaattgttttacactggctatttgttgatcagcagcaaaagttgcgaatcactcattttgtttcggacgaatcattagaaactcaaaaagaaaagtttctacagctcatgtcacaagttttgcaacatgaagaaatctatccaactcaaacatcaggcttagagttattacttgaagcatacaaaaaggataagtttccaggtatgggtgttttgcggaaagctgctgtcatgaaccacttggaattaatcagccgttatcattttacatgattgttagttatgtcatcagtcatataaagaaaagtttctctcaggagttgaaatctaactgcagctacaatcatagattttggttgcagttcaatcatcactgaaatcaccaatcagtcatgcatcaaaaatcctaataagcagctgaagcacgctaaaatttgttttaggaagccaactgtacaatactggcattcaatacataaaaatcatcaatctgcgcggcaaagactcattttttactcaaaatggttcactttaagaaaaatcgctgtttttaagaaaaaatacagctcaatcagagggaggagaagtaaattcaccagattttttcagaactttaaaaattatttattttagtttacataatatatattatacaaagttatatttggaaaaagacggttcaaaatgtttttgatttttgcattttgaccctctctcgctgtctttttccccttatgaatgttgaaatcaacaacgattcgccaattttcctgtcattggtgtttatttggctgctaattgatgtattgtcttggtgtatgtcactgatcactagtttaatacatcgatttcatttgattgggtctcgtcattaagatctttcgtttgttactaagtgactcatttgtttgatttcataaaattgttgctattgctgtatatgtttcgtttataagtttatcaggtatcagattaagctgagttaatttccttaaaatcaattcttgagtttacttcaaaaaatagcgatcgatagttataaaatgcatttctgtggttgtgtctggcggctgcgacgatcatttctgtttgagttttcttaattcatctgggtgaaagccaaaccacgggttcaaaccagttgaggcattagggattaaaactggtacggactggaatccgtatagtttcacttcttcgcgaaattcttctttttcttcaatgttcttttcgatatatgggattcgatgagcgtctaaaaataattttgtctttttgcattgaatacaattagttttgcaataaagcgttatcatataatattatttctccatcctttttatttttattggtttttatgttatttttattgtaaatttaattcttgtttaattcaataatctttactcatcaacatataaataaattggtttactactgacctgatgtgagttgagggaaaaagattttgctgataaaagtcattaaaaaagtgtatctatccatccctgtcctgtttgagtttaagatcgccctcactcctatctatttttgcggcaaaatttaaagaactgttcgctttacaaatgcgaacgaatgtttgtattatagtggtgagaggtgattcttatgggcatgctccaaccctacgaagatcgaaaaaaattaaaatggcagggattctttctatcggaacatacaacagaagtcggacaggatgagcgccagcgtcactttgtgtggcctgcaaagccagccatgactagcgaagagatcaatgaagtgttgactttagctaggatcaaaagtcgagcagtagcgatccaatgtgaagaagtcaatgaagacggtctctaccctcctgacgtggtcggcatgatccaaagctacgattctttaggcatttatattgatggacgtaaagtacattacgatgagatccggcatatttcctttttcgaagagacgaaatggttcgcactggatgaatgaatcgtaggcgatgagccacgacaagcgtacaatcggaaagttttttacggaatgtgcaaatctatttttttaaaggaggtttaccctatgcaaacgattaaaggaacagtgacaaagattcgattgctgacgtttacttcttctcccctcgtccgttttacagtaggaacgacgaattgtttgatcaatcgccatagcttatcttttttagcagatgtcacggaaggcatgtctttggtggctgttggcgagtggaatgcgcgcaagcaatttattgtccgtaaatatgctgttcgggggaaaacgaaaattatgatggacatcgaacaattgtctcaacaacgaggaaaggcggttctttcatgagagcgcgggatttgctgacagcattaacgacaacgacacaacaagagtatcagggaatttacttaagccgtaaggaaaccttggtccctttcacgacgattgcacaagatgcttctgggaacttgattttattttttgaacctaatcgtcccccactatccatcaaagaactttatacgagtttaatgttgcacaaaaacttacctttgctctattgggacggtgaagaacgacaaaaggtctatgggtttcgtgaagaagatcgacagatcattctctgatcttttttctgtgagataccaaccaatcattcttcttttcattcatggtatactatagatcaagaaaacattttcaacggaggtaaaaaatgggaaatccgcgcatatacaccatgtcttttgcaagtgtctatcccctctatgtacagaaggcggagcgcaaaaatcgtacccaagatgaagtggatcagattattttttggttaactggttattcgaaagaaggtctgtcccgacaattagcagaagaagtttcaatggaacgtttcttcgcagaggcgcctgacttgaatccgaaaagaaaaatgatcaaaggagttatctgtggcgttcgtgtagaagagatcaaggaacctttaatgcaagaaattcgatacttggataaattgattgatgaattagccagaggaaaaacaattgaaaaaattttgcgaggatagtttttaagtggtcctattctataattattgcgtttcattggtccattacgtataatgagactaccttggcaggggcaaatcgtttgcttcgatccgttgggcattcctgtccgacggatttttttatttaacttcagtctaaaaaaagcgctgtggctcttttgcaggaatcccattttggtacctccctttcttaatgtgattaggaaaacgagtcaaaatgtatacagcattcaggtcacagcgcttttagtattgctatctttctctttttttacgtgcttgcaggtgttctttgtgtctcaaatagaccaattctttctccattttacggtaacggttaaatagatcttgcgagagttctccagaagctaacgcttctttgactgcacaatttggctctgattcatgacgacaatttttgaagcggcatttttctgctaaaagttcaatcatctggtaatgccgatctaatgaagaagcagcaaccgtctccaaactgatttctctcatgccaggagtatcgatgaccattgccccatttggcaagcggaacagctgtctactcgtggtagtgtgacgaccacgcccatcttcttcacgaatggctttggttgtctgccgttcgtctcctagtaattgattgagtaaagaagatttaccaacccctgaagaaccaataaaggctaccatgctttctggcgtcaaaaatggttcgaattgcgtccgctcatctttgtagatggtggtagctaaaaccggcaaagcgaatgtcagcttcagctggttgatgattgcttctgtttctgttgtgtccatctgatcgatttttgttaatacaatgactggattggctccactgttccaaacaatcgtaacgaaccgctccaagcgagcgagattaaactcttcattggcgtttgttgtaagaaagacagtcgtcacattagcagcgattccttgttcgtctggtcgatttccagctactttccgctgtaaaaaactttttcgcggcaagacggtatcaatcaaaaattgattttgatcataacaatgccccattacccgatcgcctacgatcggatagtctttcaatgctgttgcttgctggcgaaactttccggagacacgggcataacgttcttctcctgaagacaagactacttttgccagatctttcgcttgaaagataacaattccttgattttccatgaatttcctccatttatgtttggaggtgccactctataaagggaaacctccatgatcttgacgtccattataagtattcatatgacatttcccctttcgtgagtaaattcatcgattgatgtatccctagtatagcatttcttgcgattgtcagaccagcttttcttttatagctcaataatgattagccgcaagaaatgctatggagcgttgaatatcccctgtcaatggcttcaaaaccactaaaacgaaaaagctgaaactcacgcgatagacagtcctctttaaactctcttcatcctctacgattttttcaagatagctcctcgctcattaagcaataagcctccccttgtatcactgttctactattatcgttgttccttcctatcttcttctgagatccccattcttgccctatcttccctatgttcattaacttttgaccattctcctttacccattagtgaataatcttagttcttttgtgaatgattcgttatataatattctcttttctatttattcatataagaaatatttggtaaaaaaagtttttttcttttcaactgttatttaaaaaatggtatgatagcagcagaatatttattttttcctcctttattgaaactcgcaaccccatcttacgctcgcgattttacaaaggagcaaaccatatgttaggagaaaatcatggcaaagaaacttcttggtacaatcagtggtcttttgattgctgctgtacttggtatcagcttgtacacgcaaacccaaaaagacccgaaccccacttcatcacctggacactcatctactatacaggtgaaacagtcagagtcttctaaagcatcagattcgcatacaaaagaaacccagtcagcaaataatctcgctgcattgacatatcaagggacacaaaccattactatcaacaacaatgtcccctccttctcacaagataccctctctataaaaaatggtgcatgggaaaaatatggtgatctcgatcgcttaaatcgagccacttctgcggaagctatgttgaatcaatccctgatgcctactgaaaaacgcggggatatctctagtgtcacgcctacaggctggcacaataaaaagctgaaaaaaggttatctttataatcgaactcatttgatcggctttgctctggcgggagaaaatgccaactggaaaaatctgatcacaggtacacaacagttgaataatcccgaaatgttacgctatgaaatggatatcaaatactatttagaacaagatcccagccattatgttcgttattcggtgactcctatttaccgcggtgatgaattagtggcacgaggcgttcaaatgcaagcccaatcgattggcgataatacgatccgcttcaatatttatatattcaatattcaagatggtgtgacgatccattaccaagatgggacaagtgtgctttctgaagaagcatctgatgcgactagcacttcggcaaaaaatactacatcgaatgttgctgaagatgaaaaagaatatgtagacgcgaagggaaatggtctgataaaagggtcaaaaaatggcatttatcatctgccaggtacgagaggctatgaacagacgacaaatccaaaagaatggttcaaaacgattgcggaagccaaagctgctggttatcgagcaccaaaataaaaaagccataggcttttttattttgagagcatccctattcgacacgttaaccttatagcgcttgctcgcaccttgatttttgtaactctgtcaaatagttatttcctgcttctgttaaacgcaatgtgcgtgattttggaaatttttctctcgtgattaggcctctattttccatccgaagtagatgacggtgaatgagagaagttgatttgattccttcatgggcacaaatttctcgaatagatggtgctcgtttctgttcttgctgataagcatcaataaaaaataagatccgatctcttctaatcatattttcctccagggggtagaagacaaaagcaacggacaattgaaaaacctaagcgtttatttcctataggtaatattataaatgaaaaattcccttggaacaacagtttttgaagaagtcgctggcttttcatcgcatttgttttcttttgactttatgatgaaaagagtagaagaaaaaagtgaggcgttggtatgagttttggcgaaaatctaaaaaaattccgagaagaaaaacagctcggcgtcaatcagttggctttgaaatctggagtcagtgcagcgcaaatttcccgctttgaaaatggtaagcgtaagacaccccatgtggatactgcaaaaaaattggcaaaagcactctcagtcccattgcctttattgattggtgaatccgtttcatatgatgaatgggattatgacgaaaatcaacggcgagtggcccatcaaatcaaagatatgaccgaggaagaaatcacggatatcttagaatatatcgcttttgttaagcaaaaaaatagaaaacgctaattgaaaaaagccatctgtctctaaaaaaatagaatcagatggcttttggcctgctctctgacgagaattaccagaagtgaaattatcgtggataaactgcttggatactgtcttcaagaatcttcatttgtactagggtttcttcgtctttgactgttttaggctttccattaataatagcttcatacagtccggcataaacacggctatagtctcctacttcagaaactactttttcctcatgatagattccttcatcatcataatacgtcagacagccataatgttcaggaagatcaattccaaagtccgcatgatcaggcatataaaacatttttaaatgctcttcttggcgatctttggtttgtttgacaaacatgcctttcttaccataaacgacaaagcttggtcgttctttgattcggaaatagcttgatttgatcgatacctttaaagggccatagaagaagtccagatcgaaataatcgttcatgcgattcggacctaaaagttggcgaacttctgaatggtatgtctctggttcgccgaaataagacagcacttgatcgatggtatgacaagcatgtccataaagataactactatttaatgagaattcttgtgtattttctggaatttcggggcgataatagtcatagtgcatttctacttcaagtaaatcccctagaacgccactttcaataactttttggacagtcagaaagtcagaatcgtagcggcgattttgataacattgaatcaacagtcctttttctgcagccaaagcaaaaagttcttgagcttgtgcatatgtttcagtaaaaggtttctctagcaatacattctttccgtgaagcaatgcatccttggcagtttcaaaatgcagatggttaggagtagtcacaacgactaattgaatcgctggatcatcatagatatcgttgatatctgttgtgtaggtcgttccaggaagttttgcccaagtatcgcgaatcactcgggaatagattgtttttacgtggattttgtcggataatttagtagcaaacggcaagtgatagcgattagtgctttttccattgccaatataagcaattgttagcatagtttaaagcccccatttttcatgatagttccattatagtcaaacaaacgatcagatggaagcaagaatccttctcgctgtctatttgtatgtctccttaattaactaatgaaacaaagcgcttatcattttgaaacgaataggctatgattgattcaaaaaggagaaaacgatgagatgtcctttttgtcagatcgcagccagacagcttcctgcaacaatcatttatgaaaatcaatggacaatggcgattcttcctaaaaatcccgctgcagacggtcacctcttagttataccgaaacaacatgtaacttctattcttgcttgtgacgaagaaatatggatgcaagttaccaagacagcaaaaaaggtggcaacagattgcgtgaaatctggtaactttgaaggtatcaatttcttaagtgcccatggcgctgctgcccaacaatccgtcaatcatctgcatatccatttgattcctcgaaaagaaggcgacggcatcaatgcttggcccgattttcatgacagtaaaaagtaagaaggttattaacgagtcgtcaattgaacaatgaaagagagaatgatcaatggatattcagttagaaaaagttacctaccaaacattaccgatagcgtatcggatacaaaaagaaagttttaaacagttgtttgaacactatcaggatacagaaacctccccttatctggaaacgtatgagaatttctctaaaaagtaccaacgagagaataattatttctatttgatccaagccgacggatcagcagtaggttttgtacgaatcgttctatcagaagccccggcgctggtagctcgagtggcccccatctgtattttgcctgctaatgaaaatcatgggattggtaaaatggccattcagttagtcgaagctaaattctcgtctattaagacatggcagctaagtacgattttgcaagaaacccgcctactttcattttatcaaacactcggttatcagctatcagatcgtacgagtccgattgtgactggtatggatcgtgtatttcttaccaaacatatccactaaaactcattacttattgtcttttctccccattacctatgacagagtctcttaaagagcgactgtcataggtaatcttgtttacataatattatactggtaaataaaaaacacttcttgtttccttgatacttttcgagagaaagttcaaacgagtttgacgaaaaggtctcatacaagcgttttttggagccactcattcgtttttctcaactagcttttatcagtttctttccatatttatgcaatttatttcctagttccttttcatcatctttctataatgttgctgatcttatgttataattaattatgtattttaaaactagataattactataagagaaggtggatttatggaacaacatcaaccatcctggataaaactgctttttttctttttgatttttatgggagcagatcttatgaaacaggttatcgttcatcatttcgcttggttagacgtgctgcaattaatgaatttcctaatatttattctactctcctttttcattcgccagttaccttctaccttgcgaaagattctgattggtacttatctttttattatcggtggaatcatgtctcttttatttggaaatccctttgaacttgcttcatggacactctacttcgtgggtgcgttttttggtacatttttgtgggatcatttttgtcaacgatttagacttcgttggtttattgataaaataattcgttaaaggagcgaatttcgatggattggcgcaatgatcggatcaaagcttgtcaaaatggaacaaatcccatgttaatgaaggaattatcgggtggttttgcggtttttggcgatacccaatttttaccaggctactgtgtgttgttacctaaaaaatcagtcggaagcctaaatgatttatcactggaagaaagacaagaatttctcgtctcgatgagtgttctgggtgatgccattttagccgcctgttcaccactgcgagtcaattacgatattcttggcaacacggatcaatttcttcatgcacacgtttttccacgatattcttgggagaccgaagagcgtcgttcaaaacctgtttggctatatccagcaacatattggacatgtccgcagaatacctatgatgaagagaaacatcacctcatacgtcagcgaatcacgacttctttgactgaatccgttcccggtgatcaatgagagctcttgaccaggagctttttttgttgataaaagaatttttcacaactctgatagaaaacagttgagacgtccgtataatagacaaagaggtgaaaaaatgaacgatcatcaaatgattcatttgatcaagaacaaagattataccggcttggaacaactaattgatagctacgggtcaagtattcttatgaccatccatcgaatcttacaagcccctcctgaacaaagtgaatggtcagatgtagcaaatgaagtattttatgaaatctggcaaaaaatcgaggcctatgatcctgagaaaagtagttttatcacttggatcttgctgattactcgaagtcgcggaatcgatcgcaagcgtaagttaaataaagcatttcaacaagaaagtattgaagaatatcaagagctagctattacggaatccccgttaagtgaagaagaatttctgatttggctcgaagagttatcccaagtcgatcaacaaatttttcttttatattatttttatcaagaaagtccagaagagatcgcgcaacaactggatttgcagacaacagctatttataatcacttatctcgcggcagaaaattgttgaaaaagatttggaaagaaaggatgaatcgtgatgaattttaaacagatcgttgattcagaaaatcgtcgtctcagaaatgaagtaacgcaagatgaaaaaaatcgtcttttagctaatggcaaaacatatatcttttttcaagaattgatgactgaaattcaatcactcttagataaagacgaaacagttcaaggctatctccctctctcaacttcaggcaaccttgcaatcagtaatcaagggatagctggtttgtcttatgcacgtacagaaagagcaaagcaatatgtcgtacagttcaatgatactcggagtaatcgtctatttgttttttcagaaaaacggatcctttttcttgtgatcatcgactttttagatgatcaaacctatttcagttacccctactcctcgattccggcattttctttgaagacgcgtaaactgaatcgctttgagaaaccagaagacgaggaaatcatgttttgggcttactttgattttcaatcggatagccatatttttagtgatgtattgacaaagaaagactatcaactgtttcaacatttccatgacacgattcctgcactcaaaaaaattccaatcactgaaaaaatccaccgtaaaaatcccttagattacataatcagtaattggcatttcaattatcgattgatgatattcgtcaatcttttactaattcttttagctattgggttagtcttggggatcgtctttggaatcgggatttttaaagactggtactatcgtgatttgattgggtttgttgatcagagatcattttttgtccgataattatgttataatagtcaaaaattaacgagagaaggtctacctgttttatgaaaagaaaggtactagtcccattgctgctatccttgctattaagcggctgttctgcaaacgtaccagaagaagcaaccacatcttcgagcagccaaaaacaaatgcctagcgaaaccgtagaatcatcgcaatcttctctttcagatacaaaaactgttacgagggcttctgctagcgggtctaccagtgaatcggtatcagagacggagtcaccaaagactccagaaacagcaagcgcatatccctatcaagtagatatgtcacaacaatccaatgtcctgacagtttcttttgaaggattcaacgttcctgacactgttactattgatcagagcaaagaggaagttacttttgaaagttctacacccgatgattccgtgactagccgctaccgagcaacaatcgcaacggttcccacaaaaacaattcgcgtttttagtgtaggaacgaatcaaattcgtgaagtcaaagtgaatacacaaatctcaatcggtaaaatactgggtggaacccaagatcgtaaagactaccatggtacaatgtatttgttttacaaccatgatggtgggctttccctagcaacgccgaactatgctggcaacgttcctgcagatcagatggatgtcatgcaggaagttcttccctaaatcacttcataagaacctaactttcagaaccttagcttgactacaatattgcaggaataatcaaaaatttgttgtggaggaaaatcgatgaatctcaaacgttttgtacaattgtttatttgctatttcgtatctatggtggttgctgttttactgaccaacttattcaatatttcaactatgccattttatttgttggtggcctctattattgggtatatcacattaacgatcccgttagtagtcatgacgatcaagaaaaacaaatagttccgagagtggatttattgaaaggagcatcagatgattggcaatgttcgttatctaccaagaaagttaagaaaatggtacattctctatcttatctgtctgatacttatttatggctggttgttgtttactgatcagtcagcggtacttgctgtcgctattcttctcgttctttttgcaatcgaacttgcatttatgtggcattcagaaaattcttttttaggcagtgttctggttgcttgtcttctttatggcatctggatgctacctttcgtgcttcggtgattagttttcatttattcgtatcgaaagtgaatcggagaagctagcatagagaattttcttaaaaaaatacccagagaaaagagcaagtcatgacgttgtcattgacgataggtctttgcagtaatgcaaacacggagggctctattcctttgggtattttttgttcaatttaactaatttaacttagtgagtgacaaacaattattgctctcgttcaacaagtcggtaatagacttttgctgtgataagatataccaacagataaatgactgcgaaaagagcaactgatacaacagtcacactgatcagcagattgcggtcggtcaacccgaaaagcaaaagcagcttgcgaatcatcggaaacgcgaatgcaaggtggatgatcgcagctaccaatggaaaagaaaaaatcatcaatacttgttgttggatcacttgcttgacttctttatgacttaagccaactttctgtaagatctcaaaacgttctttatcttctattccttcagagacttgcttgtaatagatgattaatgtagctgccaaaataaagatcagtccaaaaatcaaccctaagaaaaagaatcctcccgtaaacgttttggtctgtacttggaagagatcttttgattcaatgcgtgcattcggatcagctgcttgaaggtcctttcgtatctctttgaccattgtttctcgatcactggtttcaggcacttggaagtcaaaaacagtagtgatcactggttgttgatagataaggaattctttttcctgataccaactagttaatttctcagaaagccaagtatcatcgactaccaccacaagttgttgaacgggattctccacttgagtaaaaggtggcagctcagttagtgatcgaagagtgaactgactatgatcgatcgtcagctctttaggcaacgcttgatgggtccaagtttctggaaagaccaacaattcatctttttctggtccttcttttcctgtgattctttggtactccgtactagtaacaaatgtgagaaagaccgctttttctaaattctcgctgttatcttcaaaagttgttgaaggagtaagtgtgtttccctcaaccgtaaaaagtaagtctttagtagcagtgacttgtttccggtttttgagcgttactttattttcaagactatcgatggcttggttcaattgttgcagattcgcctctgactcgatctgaaagtcataaggaaatcgtgtttccaccacattcttctgtccgaaataaagactagctgttgtggcaacagtcactaaaaccattgttgacaaaatacaaatacttgctagacctgctgcattttgtttcattcgataaagcatcgttgatacattgatgaaatgggtcgtctgataataataagtggatcgctttcttaaaaactgcaatgctttaatactgccagaaataaacaacagatacgtggcgatgatcacaagaatcacagcgacaaaaaagagtgctaaggcgctgatgggcgacttgattgtgacagaaatcgtataccctaccgctaaacaaatgatccctagaagggctaaaaagccttttgctcgcggctcttgttcattgcgcttactaccttgcagcagttcgatcggcttggttcgccggacttgcagcatattgaatagaaaaaggcagccataaaccatcaaaaagtaaaggatcacaagaccgatactttctacagaaagttcaaagacgaaagattctcccacctctagaattctttttaaaatcaagaaccccaatcgtgcaaacaaaagacctccaactagccctgcggccagactgatgaggcagctataaaaaagttcccaaaagaccactaacgcaatttctcgtttccctaatcctagaacattgtaaagtccaaattctttttttcgttgtttgatcaaaaagttattggtgtaaaacgaaaaaatggcggcgaaaatcattaaaatgatatttcctagtcgaaacataaaaatagcactttgactgcttggcagtttattcattcctggattatttacaatgatttgtgtcatcattatcactgcaactagaagactcatggacagtaaaaaaggagtataagctttggtgttttttcgcaaattggaaaaggcgattttttgaaagaacattccttactcctcccttgcaaagacagctgtcatggtttccgagattgcttctagaaaagcgctattcgttcgttctccgcgataaagctgatggaagacgtgaccgtctttgatgaataatactcgttgcgcgcggcttgcagcaatggaactatgagtaaccatgatgatcgtttgtccattctgattgatttgctgaaacaacgtcagcaattgatcggaagtttttgaatctagcgccccagttggttcatctgctagtaagagatccggctttgtgataatcgcgcgtgcgacagctacccgttgtttctggccgccggataattcatagggatagtgttgtaacaagtcggtaattcccagtgttcgcactaatggttgcagtcgttggtccatttgtttgaccggcactttcgataagactaatggtaataagatattgtctttgacagaaaaagtatccaataaattgaaatcttgaaaaacaaagcccaaatgatctcggcgaaaacttgcagcgtctttttctttgatggtcgtcaaatcgataccattaagcgctaattctcccgctgtcggttgatctaacgtggccatcaagttcagtagggtgctttttccagatcctgattctcccataatggcgacatattcgccttcttctactgaaaacgtgatattcttcaatgcttcgaccggctggccgttcaactgactttgatacactttttttacttgttgaatgtttaatagtggcattgttctctcccccttcttttttagcataagctgtttagaagaaaaaagcgacttacaataaaaaacgcaaacttacagtgttgaaagtttgcggtcaaataaaatttttagtgggaaaatggatcgtcaccgtagttcccttccctacttcggagtcaatcgttagctgacagccgattttttctgctgcttgctggctcaaatataatcctaatccgctagcacgctgctgaaagcgtccattttgtcctgtataacctttttcaaaaacccgcggcaaatcttcttgacgaataccgatccctgtgtcttgaatcaaaagacaattgttttcggtaaaaatccggattccgcctttttctgtatacttcaggctattaaaaagcaactgctcaaagataaaagtcagccatttacgatccgaagtaacggtcaagtcgatagccaaatccagttgcaagtctttttttgaaaaaaacaaggcatattttttgattgcttggtgaatgagaggtgctaacacaatcggttcaaaaacaaagtcatcatttttcaagttttgtcgtaaataattcagcatcatttgcaaataatcattcactttaaatagttctgctttgacttcagtgggcgataggccatcactttgcactaacaaatccatcgctgctaatggtgttttgatctgatgcagccacaatccgaagtcttcgtagatttcttcattcttcaaggctgcttgatactcggaggcggttttttctttagcttgtcgtttgattagctgctggtattcttcttcgatactgtttcgcgcaatcggcaagaaagccaaagctgcttcagtgatcattttcttggctaataagttttgtaactgacgtcttttttgtagataacgcatatattgccagacagagaaaatacctaaaatcactcctgtgaaaatcacataatcgatgaagggctctaaaggaagctcatggagaaagaacaagcctaaaagaccgctactaaacaaaattaaaaacaaatagaacttgccgtaaagcaaaaaatactcttttaagttaatcataggcttgttccttttcaatcaaatagcctttgtttttcactgtttgaatcaaatcagacaatccagtttgacttaatttctttcgcaagcgggtcatgttaacggctaatgtattattatcaataaactcttcgctattccaaagcatttcaataatcgtttctttgggaacgattttcccttgctgttgcaagagtaaggaaaggattcgagattcgtttggcgacagcggcaaagattccgttttacttttcagcaaattttctattggatgaaaagtgacatctcctaatgaaaacgtctggacttgttgatgggtatattggtagctgcggcgcaacagcgcttggatcttagccaaaacaaacgccaaatcaaaaggttttgttaggtaatcatctgctcccatgttcattgccatgatttgattcatttgttgatccattgaagaaagaaaaatgattggcacttcagaaatgttacgaatttcttggcaccaatggtacccgttgtaataaggcaaagaaatgtccaaaagaatcaagtcgggacttaccgcacgaaattcctgcaaaatttcagcaaattttttggcgggataacactcatatccccattgtcttaaataatcagccagtactgaaacgatcgtagcatcatcttctacaaggtatattttttgcatgattctctcctatcactaaattggtgaagctatcacagacagtgtaccagaaaataaaaagaaacgtctagttgagataaatcattctagacgtttctttttatttacactttttcattcgactcactttttttaagtgcattgcggattgatgggacttgcttgattttcattagatctaataagaaagtaaatagtgggatccccacgatcagaccccagataccaaagagatgctcacccagatataaaacaatgaacgtatagaacatgggaatctctgttttatgggacatcagccgcggattgagaacataggactcgagagcatgaacaaaaataatgattaataaaacatagacaacatcattgagtccgccaatcgtataggcaataaaggttaatggaatacaagaaatgatgactcctgctactggaatcaagcttaagaagaaaatcatcatggccaaacttaacagctgaggaaagcccatgacagctaaagcaagcactgtgatcactgtattaacgatagcaatcaatagctgggtttcgatcacacttccgaatgcgcgggtaaatttccttgcgagatagtaaacatcctcaaaaaaccaggaagcactcccttgcaaaaagagctgagaaaatgccactgtttttttgttgtcaatcataaagaaaaaactcaataagaaagagatcaatacagtcaaagccaattcaccgaagttgtaaagataattgatgacgacgacgactccattttggattttttggacataatcgcttgtttgcaccaaatgtagcaaatactctaataactcattgttagagtctgctttttgataaaaatcggtcactgacttaaccagttgcgcggattggttcaaaagaatcggtgcatacttggtaatgactaagtaaaccaaagcgacaacgatcaagtacaacacgattgaaagaagtttgattgacacattcactttcttgcgtattagctggaccagtttgtaaatcaaataagtaaaaataaaggttaataaaataatagtcatcatactgcgaagcagaaataagatcccgcaaagaaagatcagcactgtccaacgtcttaatggaacattggcaacaaaccgatggtagtaattcatgaacacgctccttttttcaagtcgtcaatcaacgactgttacttcattccccaattaatctaaccactttttgaagcaattatcaactcaaatcaattaagaagactattgtgggtagagtcatatgctaaagcaaaagcagcctgctgtcagtggcaactggaccaagtatcgtgaatgaaggactgatgattattttcaaaagataaatgcctattttttcgaaaagtttatggttgttttaaggttactatgacacaatagaccttgacagaataatttacagtctgtcttagcggaaactaaggcagacgccttttttatcaaaaactgccctttgttcggtttgtatcgaacaaagggcagtttaaacgattctatatttattcttatcagttgttactcctagacgaattgtctgctttccttaaaaggacgctcactatgcgactagctcactatgactaaagagacaattcttgacgaacttctcgaagaatggcatcaacggtcaacccattttcttgtagcaactcatttgcttgataacggtcatgaaaggctttatctaaaccaaaattgacaattttgatcggagattttcctaaataactagcgacagcttgtccatagcctccttcaagaaggccatcttcaagagtgagcaacaattgatgtgtagcaattaagccagacaatgtgtcagtatctaatccagaaataaatctaggattaatgaccgtaggtgtgatcccaagctcggtttctatcatggcagctgctttttttgccaggccaagagcatttcctacaccaagtaaggcaactttgctgcccgcttgaatgagttgatttttgtttagttgactgtaatctgtttgatcgacacgacctgattctaacggaccgacaggaacgcgaattgccactgggtgttgggattggtcaatagaccaatccagcatcgctaaatattcttccttattggtcggtgcaagataaacaagattcggaatatgactcaaaaatggaatatcaaagatccctaaatgactttcatcattcatgccataagctgaagcgccataaactaaaatagttcccgccacattgttcaaagacaaatcatgagagatttggtcaaaacttcgttgcataaaggttgaaaaaactgcccaaacgggttttgctccattttttgccagaccggcagtcatggttgcagcatgttcctctgcgatcccaacgtcaacaaattgactgccggcgatttttcgttgttcaggggtaaaaaggatcatcggcgtgccagcatttactgcaacgactgttggatcctgtgccattttttctaaaagataatcggtcgttaccgttgaataagtttctccaccagaatttgcaagataatcccctgtttcaagactaaatggtccaccagcatggaatttctcgcgattttcttcggcaaatttgaagccttttcctttaacggtctgaatatgaaggacaacaggatgattgctgtctttcacttgtttgaatagatgcatcaaggctgtcagatcattgccatcagcaagataatagtagtcaaaccctaatgacttaaagaaattgttttccgcttgaccattcgtatctcgcaatgctcgtaagttattgtagagacctccgtggttttccgcaatcgactggtcgttatcatttacaatcacgatagtgtttgttccagtctccgcgatattgttcaatccttcataagccagaccaccagataatgagccgtcaccaatgaccgcaattacgttcccttcttcattttttaagtctcgtgctttggcaaccccatttgctaaagacaatgacgtggatgtatgccccactgtaaacaagtcatggtcactttcttttggattggtataaccagagacatcgctataatgcgctggatcccagaaggcttgacctcgcccagtcagcattttatgaatataggtttggtgagaaacatcaaaaatcattttatctcttggagaatcaaagacagcgtgtaaagcaactgtcatttcgacaacgcccaaattcggtccgttatgtcctccatgatggctgattttttctaataacacggttcttgcttcctcactaacttgttgtagttctgcaacggataacttctttaaatctgctggatctgtaattgattttaataacatcaaaaaactcccttctctgtttgatagtatactgcttcaccttcactttaagtcaagaaacttttgaaactttttcacgaaagtaagcaacagacaggtagaacacatgaacacaaaaaagcccacccttcaacttgtcatggtgatctgttttatcagcagaaaagttgaaggagagactctttcaaaagcattcgttatgaaacacgatcgttttccagcgttaaatgatgtaagtcaaatcacttgcaggagttggataagcaaagatcagcgcttcaatttcttggtgagtgagctgtttttccagaatcaagtagcacaaattaatcaattcatctgcgatacttgaaagacaggtaatcgcaatgatttgtccctcttgattgtaaacaagtttaagcatcgcaacaggatcgttgatgcgacggtacgtaaaccaatcggcaaggttgattgtttcactatggatctgcagattttgagcgagctgtttttcactttgaccgatccgagccaatttcaacccaccaaagacgattgtaggaatcaggggatacgtgattgcagaacgagaacctttttggctcattgaagcgaccgcatattttgcttcaaaacttgaaacaggcgtcagtttaggttgttccttatccaatacatctccacaggcaaaaactcgtgggttcgatgtttgtaaatagtcattgactttgatcccgcgtttggaataatcaactcctgcattttctaagtgtaaggattcaacatttgggatgcgtccagcagcacttaccacgtaatcggtgtccagctcaaagcctgtaccttgcagcgtgtatccttcattgatttggctgatgctttcaatctctacattgaaatgaaaggaaattccttgcttttgtaattgctcaacaaaggcattcaccaattcttgatcaaatgctttcagtggtctgtcgttatgatgaataatgtgtacctctgctcctgctgcttgagcgattgtcgcaagttcaaaagcaacataccccgctcctaaaaaagtgattttcgcgggcattttttccattgcaagaaaatcggtgcttgtatgcaaatattcttgtcctttaatcgggagtagcgcaggtcgttgtcctgtagcaatcaagaactgatcagctgaaacgatttctgaaccaatccgcagcgtttgttcatcgataaatcccgcttctccttcataggtcgtgattccagtatccactaagccctgcttcgtctgtgtgggaacagtgtccgtgtaactgcgcttgaaagccatcaaagttttccagtcaatacccagctctccagtgatcccttttcctgctaagtgagcagccttcgcctttgcttcaacggcactcattaaaatcttcttggggtcgcacccgcggttggggcaagttcctccccagagatcggcttcaacgattgcgacagtcttcccttgctcgctgaaagaataagccgcagcagttccggctggtccaccacccacaacgattacatcatagttttgcatcttgctcctcctgacttagaaaatgaaagatatctgtacggctaacttcaccaatcgcttgtccttgttctgtaacaaccaaatgttcgtggttggccaagacttcatatacttgtgaaagagggactttcacatcgagggacattccctcttgtgtagttgattgttggtagtaaccagaatcaataatcgcttgaagacgttgttcttgctgtgctccttgtgtttcgtcaaaaaaggcgcgaacgaaatccgtttttggctctgtccgtattttttcaggcgtatcacattgtaccagtctgccttcattcatcacaccgattcgatctcccaattttaaggcttcattcatattatgggtaacaaagacgatcgtattgcctaatttattatgcaaatctaatacgagatcctgaagattggttcgagaaatcggatcaagggcgctaaaaggttcatccatcaagatgatgtccggttctgcagccaacgctcgcaagattccgatccgctgactttgaccacctgaaagttcagccggcatccgttttttgaacgtctctggttcaagtccaacctcagtgagtagttcatcgacacgttgattgcgacgatttttatcccaaccgagcatttctggaatgatttcaatattctccttgacggacatcgttggaaataaagcaatttgctgcaacacgtaaccaattttccaacgtaacttttggagttgatagtctttcactcgtttttgtttgaagtaaacattgccttccgtcggttcgatcagcccattgatcattttaagggaggttgtttttccgcttcctgagggacctactaagacaaagatttctccttgatgaatggagagatccaattcttttaatacgacttgtccctcaaattctttgacaacttgtttaaattcgataattggttccatttagtttccctccccaataatcttttctttttttagaaattcacgagcaacatctgccggttgttttccttccacattcacttgatagttcatgtcaatcatctggtcctctgtgatttttcctgatagttttttcaatgctttgacgacttgcggatgttctgcagcaaattcatctttcatcaatgcggctccttgataaggtggaaagagctgtcgatcatcttctaaaacgacgagattgtattgtttgatctcactatctgtcgaataagcatcgatcacatcgacatccttgctttgaatcgcttgatagcgcagtgccggttccatactttggacagaatcaaaagtcagcccgtactgtttttggatcccgcgatagccatcttcccgatcaataaactctaaagtaaaaccagcccgaagctctgactcatgagcaactaattcagaaatcttcgttatacccaactcttctgcttgttcacgacgcatggctaaagcataggtgttttcgtaggtcatcggctctaacaggcgcatattaaactggtcactaagcagttttgttgcttcttgataagttgattctggagaaccatctatttgggtattttctgggactttgactagactttctaatactgttcccgtaaactcgggataaatatcaatctggtcattttcaagggcgctaaataagaaacttgttttaccaaagtttggtttgatctcgacggttaaactaggatcttcttcttcgatcactgcttgatacatattgataaggatatctggttctgaaccgagtttaccagcaatcgttaccgttttatttgaaataggattatactgtgcgaaaagaattccgccgattccaagaaagataacacctaaagagatcagtgtggttttcatactgcggttttgtaaaaaacgaatcagtccactgaataagattgctaatagagccgaactaaccgcccctatgagtgtcaaactcggatcattacggtcgatccctaacaaaataaaggttcccaatccaccagcaccaatcaatgctgccaacgtggccgttccaatgatcaacaccaatgctgtacgtaccccagaaatgatgacaggcattgcaataggtaactcaactttgaagagttttcgcaagtgagacataccaaatgcatccgccgcttcttcaatcgacggatcgatttcggaaagcccaatatacgtgttttgaaaaatgggcagtaacgcataaactaccaatgctattagagcgggaatggtgccaataccaacaaaaggaatcaataatcccaataatgccaatgatggaattgtttgtagaatacttgtgatctgtaaaacaaattctgccattcgtttcttttggctcaacaaaattgctaatggaatagcaattaaaatggctaaaatcaacgcactcagcgaaatggccaagtgttgaaagattgcccgcagcaactcctcctttcgctcgctaaacgtttgaatgatttcgttcatatattccatcctccactattctagtctgccttaagtatagctgaatgcccaaacgcaacaaaaagatacgctcagcaggattgggagaaaagttggcctttcgcatctaaataggatccattatttcctgacattctgttacaataagtctaaaagaatgaggtgcttctatgccattactggttttgattggtgctcaggctgttggaaaaatgactgtcggtcgcgaactttaaaaaagaattgatggtaaattactatttaatcatcaaactattgatttatttgccaattatcttgggtatacgcctgcggcatttaagttgtctgattccactaggatcgaacttttcaaagcatttgtggctggtgaacagaatacagttaagacaatcatatttactgttttagtgggatttgatcagaaagaagatattgcttttttacacaaaatttgtgagatctttttaagcgctggacaaccggtttattttgttgaacttgttgcgcaattagaggagcgcatcgcacgtaaccgtcaggaagcacgtttaaaagcgaagccgtcaaaacgggatcttgctttttcgcatcaagaacttcttacttttaatgaaaaataccgtttggaaagccattcgacggaattggcatccctttttccaaaagtaaaaacgatgaaaatcgataatactgagttgtcacccgaaatggtcagccagaaaattattgctaacttccaacttgaatgaaagataagaaggacactaatcttaggaaagcagattagtgtccttctttattcttattttagtcaaacatccgatgtcgctgtgaaaaaaccatcagcaaaagaaaagacttccccaagcacttctattactgatggttattaaaattcacgttgcctttttatgataagcgacgtgtattgacactaccaaatctattttttcattccttcatgaatattatgactatcgtataaaaatgaataatcagctgattcgagtttccttctataaaatcatctttctacctgatatcctatcacttagggaaaaaatagtataatcactttttgcactggaacatgaaaaaaagaaattaaagactttaccacttttttattctcagtacttgaaaagctactccatctaactgatcaatcaatcatactaactcctgtcaccggtacaagcatttctaagttgattgaccatgatcatggtcaatcaagtctgtcaatccgcatatatctatattagtactactgattatttatctttttatagagacttatagccctttcaatgctgcgctgcttatttggcgattgaaacgttatgtgatttttttagttgaacataagcaatattcaaaataaagccgacgactgccaaagcaattgctgtatagaatgcatttgtaaaatctccattgttgctggcagccattcctgctgctactcgtggtccaaagaaagcagctgtagaataaccaacaaagacgattccatagttgactccttggttagctggtccgtaattttccattacgatcgatgggaaaacccccatcactccgccaaagcagagtcctagcccaatgattcccactgcaaagatcatcgcttcacttgaaagtgtcaaaacgagtaaagataacgctacgacaccgtaaatgatcatcaatgtattggaacgcccaatcttatcagaaactgttccccaaatcactcgacctaagcaattgctaaaagaatatagactaacataaaaagcggctgttgtagctgttaatccgaacatttcctgcccaatcacagcagcattggaagcaatcatcaaaccagaaaatgccccaacaccgagcatcaagataatcaaataaaaagcaggtgttttcatcatctcttgccaggaataatttgctgcggttcctttaaccgcagaagtttgtgggacccatcctgctggacgataatctgcaggggcttttttgataaagaaacttgccattacaacgacgatcatataagcaataccgataaaacgaaaagcagtcaacacatctcttgattcaataattgcattcgcgatcggtgcggcgatgatggctgcaccgcccatacctgcagtgatcaatcctgaagcaagtccacgtttgtctgggaataaacgaatcgtattacttaagcaagcagaataagcaaatccttgaccaagacctgaaagcacaccataagttagatagagcatcccaggtgattccacaaatccagttaagaagaaacctagcgcaaataataaaccaccaaaagtaatcgtccattttgccaatccacggtcggtcaagaatcctcctaaaatcattgtgataggtccgacagcagcattgattgtaaatgccagcatgatttcttccattgtccaattttttagttgactaagcggtccagcgaaaacgctaaatgcataaacggcacctgtacataacagaacagcagttgaagcaatcaagactagccaacggttgagttttgtttccatgttttacccccaaaaaatagttttgtttaaataaattgaatgaatacacctcatgttacttatttcacataacgttttgaaagaaaatgtgcagtgcgattctctgcacatttcttttaacctattaaagattttctgcaactgctgtcttaccagcgatccgtccaaaggtaaagatatcagtcaatgagttaccaccaaggcgatttcctgcatggattcctcctgctacttcaccagctgcatatagacctttgatcacttgattttcttttgataacacatgggtttgtgtatcgatctttaacccccccatggtgtgatgtactgccggttttcttggagttgcataaaatggagcagtcgttactttaagatcaaacacatctttgccaaattcaggatcttttcctgcatcgacataggcgttgtatgcagtgatcgtttctttcaagatggttggatcaacattaatttgttctgctaattcttcaagggtatcggcgcggaataatgttccgttagctacttgtttgtcgattttttcttgggacgtattgtacgctgttttcttgatttcttcatcagcaatcaaatagaataggccaccattatcgattgctgcttgtgtcaatacatcacggctttcatattcattgacgaaacgtttgccttcttgattgaccatcacaaagtttgcgggaggtacttgcagaccgctgaataatgctcccgtattcggatcagataccggcatcatttgtgagaagcccattccaactagatccgcaccggcactttcccctagtttgataccatcccctgtgattgccggcgaattggaagttttgatgtcatcttcgatttcagtccaatacgtgttgtactgcttcagcatttgtgtattcgcaccgaagccaccagaagctaagataactgctttggcatggatcgttactttttgtccattgcgaccttccccaatgatccctacgacttgtccctcttcgatgatcaattctttgactggtgtgtcagtaagaatttttccaccattttcattgacgaaattgtgtagggcagaaacaaaagcgtacccttcatttttcaatggtttatggcctcggcgccattttgctccaactggcatatcgacatgtttgtaatcaaattcaacgccgatttcttctagccatttcacagactctagtgcacgatcagttaggatttttactaagtcatattgaccgtaaatcacatttccttctaagtcggtccgtttgccgcctaaataagtttggatacgatgccagatggcagagtcaaataagaattctttttctggagtcgttgcttgtaaatacgttgtgatttgttctttcaacaatcgaaaatcagccaagtattctgcatcaatggttgcttcatctacggcaatgatttcttctagcgcagcccgttcacctggaagcgcagcaaatgttttttgccaatccggatctgcggcattcattggtccacccgtgcgaacggtattcccaccgatggctgggtatttttcaactaaaatcacctctttgccttcttggaggatacttgctgcggcactcaatcctgccccaccaccaccgacaacgatgatatccgtggtgtaagtttcatcttccgtttttagcgcactggctgccttaggacgttttcttaaaacatctgggtttgcaccagccattttcactgctttcgcgacaccatcaacgacaccgttactggtaacggaagcacctgagatcgcatcgacgttcaatgtttggccttcaatgatttcttgtggaacacgcgcaaagaccacatctgcgattccttccgattcaccggaagtatcgatattgattgcttcgatccgttcttcacttaatgtaaccaccattggtaaatcaccattgtgtcctggtgccgtgacagtataatccccaggctgataaactacttcttcgggaacattcaagatattagcaacttctgtaaagcgaatgaattttctaaaacagctttccaaaaagtcaacagtccgttgatctttcagctgcccattttcatcgaatgcttgatgcgcacgacctaaaagaaattcattaccaggcataaccgttgcattgacaccaggtgcatcaagaatttgacgcaagtgtagttgtgcccgtgaagaaccttggacgtcataagaagcacccacgatcatcactggtttgccatcaaacgggtgtagattgaaggacaaccactctaagacactttttagtgcggatggtatggaatgattgtgttctggtgtcgcgataatcacgccatcggcagccaaaattttttgatttaatgtttgaatgacttcactattggtttgatcctctgtttcattgaacataggaacttgatcaatttctaaaatttcgatttctgctaaatcggcaaatgcttgttgcatatatgtcaccagttggcgattagtcgatttctttgcatttgtaccgatcataccgacaaatttcatggtcatttcctctctttcttatacctgttcccaagaaaatttcttcgagcgctctttggcagtcgaatattcactgacgagacgattcgtgatttccacgaataatttgaattcattgaagcagtcttctaattcagcgactttttcctcatcttttaagcatccatcttcatcaaaggcttgcatcgaatgaccgagtaaaaattcggcactaggcatgattcgtgctttgacttccggtgcatcaagaatttggcgaagatgtgcttgcgctcgggaagaacctaaagcaccaagtgatgcaccagtgatcatcactggtttgtcgatcaagggacgggtcgtataagaaagccattcaatcatgctttttagtactgctggaatggaatgatcgtattcaggtgtactgataatcacgccatcagcagcctcgattttttctgctaattctcgaactgcttcaggtgctgttctgtcttctggttcattgaatgctggcagatctttgatttcgcaaagctcgatttctgcctgatctttgaaatgggtttggataaattgcaataactggcgattggtcgaacgtgcagagttagtgccaacgattccgatcagtttcatactcatctctcctaaatgtgataaatttaacaattgattcgattataactcgcttttagatcaattgtttcaaaagttaatcgtacaaatagtcgtcttagaaagataaaaatggtcaaactcagcttaaatctctctgatttcattccgatagaaggatctgaaggacaatttatttgttccaattaagcacttctacagtttagtctgaccatttacatttgtgaaatatttatttaattatattatgataacttttttgttataatagacatatttctacggaaggagcaacttctatgtctcttaaagattcccatttgatgctgcagtacatcgacacattactaaagtacaataactataccaaagcagcgaaagacctatttatttctcagccttatcttacgcaagccatcaaaaaagtcgaacaagagttgggaacggccatcattattcgtcagtcaggtgttttgcatttgactgaagccggtaaaatctattatcaataccttgaaacattggaaaccgcttccgcgaaatttcgtcatcggttactgcgctacacatcaccagaaaccaaaacattgcgattgggtatcttgcccagtctgggctcgttcttgctcccactttttttacctgactatttggcagaacaccaggatgtgtccgtttttttgcgtgaagatttgccgaagcacaatgagaaacgtttattaagtaatcaattggatttttttgttggccagaacccggagactatttcacctaatttgacgacttacgccacaaagagtgaaaattattttgcgatcatcccccctatttcgcctttgtatcaagcaaacaaaaaatttctctctcaagacagtgtttcaatgaaagaactgttacaaagcccgttgatattgacgacaagcggctccgcgattcgtcggcaaattgatcaattattgaaaaagtacaaagttgaaccaaccattctcgtagaaagcagcaatatttatactgcagcagcacttgctgaaaacaatctcgggttggccatcgttcctgaaagtgtcttgcaagcagcgacaatgacgcctttcaacctttatccgatacctgaagaaatgctaacattaaattattttatcgctcatcaagcagagcgtccgttatcgatagctgatcaaaacttgattcgctattttctagaaaaagtatgatcgctaaaaccgccatcaaaagtcaaaaaaacatactcaaagaagaaagagtcagaagtaatggtatgtcaaacgagctaaacagattaagcaggcactttaagatcgtgcaattgccagggggcgcagtcgttctgctatcttgtttcaccagtttaaatacttcatttaccagactctgaaagctgctttgtcaaggcagtttcgtctctatctttgagtatgtttcaattagactttttgattcgtttcaggtaactcaatcagtggttgtagcgtagagggataaagcaattggccttgtcgggttacgattaatccagtgatgccatcgagttggctgagttgtttcatgatttcttcaggttttttaccaaagagacgtgtggtccaaatttcgccatccactgaacgatcggaaataatcgtgatacttgctaacgctgattctatcggataaccggttttacgattgaaaatatgatgataggtcttaccgtcgacggtgtgggaacgttcatagatccctgaggttacgatagaacgatcgcggatttttaaggctgccacgaaatttcctcttggcaaaaaaggattctgaattccgatacgccataagtgatccgcatgatttggtgtttcaccaaaggtaacaacattcccgcccagatcaatcaaagcggcactgacaccagattgcttaaaaaaatctgccagctgatctgcgaaatagcctttggccacagcacctaggtctattgacataccggcagctaaggcaacgctctgctgttggttatccaattcgattcgttgaggatcggtcacctgtagtaattccgtcactttttcggcagtcggcactttggcatctgagaaaccaatacgccactcctgaatcaggggtcccatcgcgatgttcaagaaactatcctctggcaagctgtgctcttttgctaaggcgatcaaagcaaacaagtctttggctactttggtcggctgaattccggcgttttgattgactttcatcagatctgaagcaggatcattggcactaaaccgtttttcaaacgctctgatttgttggactgctgcttccaaaattggtgtgggatcttcatgttggatccaaagctgaatgatcgttcccatcgctttgacttgtctttttccttcttgcatccgttcgtttcgcccctagttttttttgttcatcatagcagtttttcagaaaaaattgaatgcctttagcaaataaatgcaactataagaaagtcgcggacaggctttaaaacattaaatcacccggttcaatgaaatcatttcgatcaatccttgcgccgcttctgaacctttattgcccgctttggttccggcccgctcgatggcttgttcgatagtttctgtagttagaacgccaaacatgactggaatgtctgccgctaatccaacttgggccacgcctttcgcgacttcattgctaacaagctcataatgggtagtcgcaccgcggataactgcacccagtgtgatcaagccatcgtattgcttcacgttgactaatttttttgttatatagggaatttcaaaggcaccgggtacccagtaaacatcaatgtcttcttcttttactccatgccgtatcaaattgtcttgggcgccactcaaaagtttcgccgtaataaactcgttaaaacgcgcaaccacgatccctactttcattccttgtccgtcaaatgttccttcaaattgtgtcatgttgtgctctccttctttctcaaagtgataataaatgatggaatttttctttttttgtttgaagataacgattattttctgcaactggagttatttctaacggaattctttcagcaacatgaatgccatgagcttctaactcggtgattttttctggattatttgtcagcaagcgaatcgtatcgatgccaagagacttcagaataatcgccgcaaaaccataatcccgttcatctggacgaaaacctaattcaacattggcttcatacgtatccaagcctttttcctgtaattgatacgcctgcagtttctgtttcaagccgatacctcggccttcctgacgcaaatacaagatggctccggtaccttctttttcgatttgacgcatggcttcatgtagttgttccccgcaatcgcaccgctgggatccgaaaacatctccggtcaagcattctgagtgaagacgaaccaataatggttttgcgggattagtcaaatccccttttgctaatactaagtgttcaagatgatgctgatcttcaaataaggttaaatcgaaggatccaaatgcggttggcaattgaacggttaactgacttgttgccatataagtcgctaactcttcgatagtgatcatcggcagctgccatttttccgcgaattgagccaattgtgggcggcgagccatcgtgccatcctcatttagaatctcacaaatataggccgcttcactttgattggtcaattttgctaaatccaatgcagcctcggtatggccccttctttccagcaccccgcctattcttccgatcaacgggaaaatatgacctggtttttgaaagtcctcttccttagtttgaggattagccaatgctcggatcgttcgcgcgcgttcttcagcagaaattcctgttgtcgttgaacggtgatcgacacttatagtgaaggctgttttgaaagtatccgtattttgcgcgaccatttcagttagctgcaagcggtcagctagttgagctgagataggtgcgcaaatcaaccctcgagcaaatttcgtcataaaattcacgctttccatcgtagctagattagcgatcccaacaaggtctccttccgcttcccggtcgtcatcatcagcaacaataattaattgcccatttcttaaatagtctaatgctgtttcgattttatttttactcataggacatttcctttcttccgccacggatcagttgattggctttgacatattttcctaatagatctgtttcaacattcactgcttcaccgcggttaagtcgccccagattggtttgatttttggaatgaggaatcagtccaacggagaaatagcgcagtgtggtctcgataatcgtcaaactaaccccattcaatgcgatagagccctgtggaatgatctcatttctcagttcgtcgggataagcaaatgtcataatcagcgcattctccaacacacgcttttctagcagcgttgtcgtagtatctacatgacctgccaccaagtgtccttccaagcggccgttgaaagctaacgctcgttccaaattgacttcgtcattgatttttgcggtcgaaaaggtggttcgttgataagtttccggcatgatctcgacagtgaattcttgtttgccagtcttgatcgctgtcaaacatacgccattgatcgccatactatcgccaacccgataatccgttaacaatgcttcagaagcatgacaagtcaatgcaatggtgcgaccactaggcacgatccgtgtgatcttacccttttcttgaatgagtccggtaaacattttcctgcctccttccaacgatccttaactcttctccgaccggttcaacagtgacttccgttagcgcaaacatctgattcacttctcgagaactagcaaaactcgctgttccattgccgccgataagttttggcgaaagataggtgataacttgatcccaataaccatccgccagaaaggcatcatgaatgctgcttccgccttcaacataaaccgattgaatcttgcgtcgatacaattctttcatgacaaacgagagagtcagtgaaggcgtggtaatgatattcacgtgatttgagaaaacagattggacttttttcgtagtaaagaccagtacaggactactggtatcctcaaaaagagttagctgctgtttcaaggtttctcctttacgatctaggaccactcgataagtcggaaaggcagcctctgtccgcaaagtaggattatcgattaaggcagtgcggctccctatcaaaatagcctggtagtctgaacgttcctgacgaacccggcgcaatgcagcttcaccggttatccttgctcgctgaccagccaaagcgatttttccatcaagtgtggttgcttgctttaaagccacaaaaggacgttgctcttcgtgatacgtattatagtggcgattgatttcacgtacctccttttctaaaacaccggtgatcactgctactccttgtgattctaaaaacgctttgcccttgccagataccaacggattgggatccaattgaccaattaccacttttttgatgccgctttgtagaatagcagttgtacaaggtggctgttttccgtaatggtggcaaggctcaagggtcacataaatggttgaatcaattagtttttcgggggaactacatgaatcgatggcgttcttttccgcatgtggctggccataagccatgtggctgcctacagcaactatttcctcatctttcacaatgacagcaccgactaaagggttcgtgaaggtttgtcctttgccttttagtgcttcggatatggcgcgcttcatatacgtttcatgcataaacattcctcctttctttaaataaaaagacctcgtgcataagtacacgaggtcttgattagacaaactcaaagaaacgatgacaaaaaggatagactcctcccgtcaatattcttgtaagtttttcttctcccatccagactttaactgtcggttccagagtttcactggatcaaccgcacgaatgcgggtcacggacttcaagcattgcttgtcaccgtcggtcgggaattacaccctgccccgaagaaacatattcaattcacgttagatactactattttttaattcaggtgtcaaacccctcttctatcctttttaaataacaattaaggaaaatgtttaagtacaacattcgccgttatcggagaagactttaaaaagttttttaggaattagcgacctccaaacaaacaattaaatgaggttccccggataaattatttctctttttatattttatttatttcgattgaataacacgtttttcgaacagataaaaaaagacttttaaagagtttaagaaacactctctttaaaagtcttgtgaatggaataaatatgttattttgctgtagtgaaataaagtttctgactcgttaagttttccaaagaaagcagaaagaaactggcagctaataaattggcacttccgccgggtgaaacattttgctgttgacaatagttgttcaatgcttcaaaagcggcgctaggaatgggctgtttattggcttgctccacaatgccgtcagaagtactaaagtattctttatctaacaagttttgattttgataaatgtttcctactacctctaatcggtttctagcactcatcaactctgtatcataaatatgcttccctttgattctatatgcaccgctatcgattctgtatacttgtacatagctgtgccagtaagtatcactgtaattaacggatgaacttgtatgcaaaagaacatccccctcaaaaatctccacgccgttcttgtctttcaagccagtggattgcatgaggaatgaatcaattgctggaaaagtatgatcttctggataatctccgcttacatcaagtatgtttgtaccgtcatcatctaactcaaaacaaacgccttctgtacttggataaatcattctgtcattttctttatcccacgctctaaattttggtaccatcttatccctcctgctccaaaggcattatttcaatttgtgtgaatgtatcctttttttcttcgatttctttcgccaacttcttcgcaagttttaaactctcgcaaacctttttcagttgaactctcccagaaaatggattctcaacataaactaaatacacaaaactattcttagacatcttatccctcctgtttgctatcgctgacgattgcggaaatttactactatcttttattatttaccgtcttgcaatactgtaagggttgctaactttccttaatgatataatttgattattaattaaaaaggagtctttttatggacaaagtaaaagaagtagtttcagtaatactaatatttgctttgatatattttttgttgtgtctcgtcgcatctctcataatcagtttttttagattagtttttaaaagagaacctttctttgtaaactttaaagaattgtttcttaacttgtttttagaaattttgaatccttttaattatctgttctgattaaagcatttcgtcggataactgacttggtaaaatataaaatatgttacaatacctaaaaggaggtattgctttgggaacttttttagcttttatttggtatatttttataggatttatgctttatggaatcatcagattggcagttaaacacggaatttccgattccaaaaaaaataatttatgattctgttgctactcttttagagtagtttttttatttccgcaatttttggtgggtaactgactaaaccagcgatccgtcaactgccaataatgtcggttcattgtcattaatacaatcaaaaacttgcacctctgcctcttcactaccgactggctcccctgtttgttcactcactgtattcgcaacttttgtaatggcaactgtcgtctcaagttctttcatactagctacaaagtcctctttatcttctacgtcacacactacttcttcataaaattccatacattttccctcatttcagctgctacaattgcaaaatatggctcattaatttcaaaaaatctcatttttcatcttcctttctagttgtgtatttctgtcgttactaaattttcatatctacaaacatttatagtatttatttattttgtttgtttattatggtactttatttaaaaggagtgattctatggcgaacaatattgaatttgaagttgaaaaagtttataaaggcagaaccaacgaaatctttgttattactgatcccgagacacaggtacaatatattcaaacaattgttatcggttctgacggaaaaggcgtcgcaattacaccaagactagagccagatggaagtattcattataaggattaattagatcaacttgtgttggtcttttttctttccaagttggtaatttcttccaattgctgactaacgaccgctaacgaatttcctcagactatgcagacctctgccacgtcttttcgatttccgattaatccaagtaccagttgttccccaataatcaatcatgccttttggcgtattgatcgcaaattgatgattattggataatgggtaaactcaaaacccaaagacttgatattttttatcgctgaatcgcccatgcgcataacatgctgctttctacgctctttcaggtaaggcttcgcatctttccagtattcagccatttctcccataaaataccttctttcttccgattacaaaccccttatttagccaaaatcatatttttcagcttaacaacagtttgatcaccaagaactttctgccgccactcgtcctgttctttgtgacagacaataattctcacatgtgccgatttctcataaattttcagacattccgctctaaccaattccgaaaatccttcgatggcacagttgtagatcttgccgacttttactttcgtttttgctggtctgaccttcggttgaatctcgaagcgacgtccttctggatgaataacaaaagagtcttgtattctcatgatttttcctcataaaacttactttcgataaatagtccagtttttcggtcatatttagccaatatcaattcgatttggtacctaaaacaaaatagtttagcttttattttaaaagcctcagtttgaactcctttaacatcaaccgcttggaccaatttgtttccatcccaaaatgtgaagtccggagtataagtgattgaacgtatggttttattccctatgcgaaatttgggttgaagctcggatttttcttgtaatcgaagttcaagaccattggtttccgcatatttagcagcgaatggaaggtatcgtgcttcagcaacactatcgaatttaatgccattgacaacagtttttcgattgctatattttggtttcttggatagtttagttgctctcatactgccgcaccttctcttgccatcagtcctcgatatagcaacttggcttcttgccacattgattcagtggttccggcagtgagaaactcgccatagtgcgtcttcgatacttttcccaagctgattcgagtgtgacgatacattaccatgaagattcgaaagcggacctcttctggctgattgctgtcaaggattcgcttaacgttttccatcaagttcttgtgactagggtctaatgcagcgtagatttgcttaattacagtgattcggtttaattgatcaatttccaaatggatcatcccccgcttcttttcgtagtcgttccatgatctcagcttccttttgagcgttatatccttctggatcgttgagccattctgggataggttctgtgcgaattggtttcttagaatagctattttggttcttgtgccttacatcatctgctctaacatccgccatagttttgatatttttctttacccagctttgcataattcctttggcatatccgtatgacttctggtctatagcagaccgtctcatagcctcacaaaccatttcttcgccaatatcctcaacccaatgacgtagatcatcagcaactaatccgttaatcactccaaagacttcttgatagagctggaaaggattagcagcagccggagcgctctgcgcattctctgctgttgctggtgatgttgttggtgttgttgctggtgatgatgctggttgcgttatcgtatcgataccatatccataccctatcgatacggtattttcttttggtttcaaagtttggatagggtatttatattcttgacacttcttgatgacctcaatctcaaattcaagtgtctttatctcctttaattctttgtcgatgaccgctgcgactttaggagatctggcgctgttgtatttgagccagttgactatcatcaactcttccgacttttcattaaagacgattcggccttcgctaacgaggaagtcaatgtttgtttttatttcttctgcagtcatatctagttcaaacttcgcatatctcagattgaattcataaacaccacattgagttgtgtaatcattcgataagagatataggaaaaaaagtttttgatctttgctccattcaccgactcgtttgtctttccaaaaagtggtatggagttgtctataaatagccattctttaagcgactcctccttattccaataaatcgcctacttctaaaaatcctgttaaagacttatgttggcgacagtattcacatttcccgcacattttcggcgcttcttctccatttttcactcgtaagatatgaggtaattcttgttccaataatcgaagttcaaaatcaaagcgtccaggataaatactgataccagcaatatcaggaggcgactcttttgttactgcaaagatataaggtgtaatttccctgttataggtttgttcgagtaagtttttataaacagccatttgtagaatatagccatattgctcaacaaacgaaacgtagccactatatttttgtgaccagtatctctgagaaagactccgagtcgtttttaaatcaacaagataacctttctctaaattgaaacaatcaattctggctttccattccgtatcaaatagcgttcctgttagaatcagttctttctcgccttgatagacaaaacgaaaaaatcatcatattctaaggtttcaatcatattgatcgcctgagcaaactctgcccgttctgatccattctttttataaatagcacttgcattctcttgtataaattcttgatgtgcctcaggagacttaaaataggaatggacatagtttccaactagtaaagccgtaggatcactctctggcgaccattcttcttttaattttgccaaagtcgctgcttcgcattcttgaaatgttttgaattggctgactgacatatactgccagtcagcttcattgctataatagttcttcttgtttaagtccatcggtatccgtcaccttcgcttctttcaaaggatctttctttgtttgagaaaattcttgttctagtttcgacgattctttcttttcggcggtcggaacctcaaaccaatcttctactttactcatgccatgagtgttgctgattactttgattattggtttgaaaactacgttgaaaaaaagctaaaatacaatactcagaaaaattatctaaacatcattaataaatacattaaaccagaaataggcaagtattacttgagctctatcggcccctctcgtcttcaagatttaatgaacaagttacccaatggatttgaccgccctcttgctaaacattccgtagaaattgtacttactgttttaaaaggagcatttaaaagagctgtctatccatggcaagcaatcaattcaaatcctatggtatacgttgaaatgccagccttcgaaaataaacccaaacaaacaagggatgacatgaaaattatcactatggatcagtatcaaaaaatacttgaatttaatcccccatccagtcctttcagattaccactcatgattggctttcatacaggattgcggagaggtgaagtatgtggtctacagtggtcagatatttctttggatgagcgaacaataacagtagatcgaataatgttacaggacaagcatggaattcagcttggcactcccaaaacacaagcaagtttcagaacaatagcaattgatgatgtattagcagctgaattaagaagagcaagaaagagtcaatcagagaataaacttaggtatggtaaattctattacgattcaacttttgtctgtacaaaagacaatggcgaaccagtgacaccaaattctattaaatggcactcttctcgaataaaaaaggaactcggaattgattttaattttcactctcttcgacatactcacgctaccatgcttttagaagatggagtcaagccaaaaattgttcaagaaagattgggccattcaaggattgctactaaaatggacaaatatgtccatgtaactagaaaaatgaaaacagaagccgttgatatattcgcccaacgattgaaaaaatccgctgaaagataaaaaaattgtcgcccatttaaatttatgggcgacaatcgggcgaatgtttttgaaaattcacaaagaaacaacaattgttttcaagaaccccttgctatttcttcggttcatcctcatccattttcagaacggccatgaaggcttcctgtggaacttctactgaaccgatttgtttcatgcgtttcttaccttctttttgtttctctaggagtttccgtttacgagaaacatccccaccataacatttcgctaaaacatttttgcgcagagccttgatatcggagcgagccacgattttttggccaatcgctgcttgtatcggtacttcgaattgttgacgcgggatgagttttttcaatttttctacgatggcttttccgcgttcgtaggcaaaatctcggtgaacaataaagcttaatgcatcgactttttcagcgttcaacaagatatccattttaactaacttgctggtacggtaaccggacatttcataatccagtgatgcataaccttttgtgctggatttcagtttgtcaaagaaatcaaagacgatttcagataatggaatttcatagacgacattgacccgataatcatctaggtagtccatggtgacaaaatctccccgcttacgctgtgagagttccataaccgcacctacatagtcatttggtaccatgatttgtgctttgacaaaaggttcttcgacattttcaatagtacctggttcagggaaatctgctggattatcgactgtcacggttgttccgtctgtcttgttgacatgatagataacagaaggcgctgtcgtgatcaattccaaattgaactcacgttctaaacgctcttgaacaacatccatatgcaagagacctaggaaaccacaacggaaaccaaagcctagcgcttgagaagtttcaggctcgaattggagtgccgcatcattcaattgcagcttctctaatgcttcccgcagatcattgtaacgagaagtatcgattggatagagtccacaatacaccattggattcatttgacgatacccttccaaagcttcttgggctggattatttgctagtgtcacagtatcccctacttgtgtatctttcactgttttgatagctgctgtgatataaccaacatctcccaccatcaatgcatcccgttggatcgctttaggtgaaaataccccaacttcggtgacatcaaaggtttttccattactcatcatttgaattttatccccaggtttgaccatcccatccatgatacggacgttcagaacaacccctcgataagaatcgtagacagaatcaaagatcaatgctttcaatggcgcttcaatatctccagctggtgccggtacatattcgacaatttgttctaagatatcttcgatgccaattccggctttggcactagctaaaaccgcttcacttgcatcgataccgataacgtcttcgatttctgtacgtactcgttctgggtctgctgctggcagatcgattttattgatgactggtaagatctctaagtcgttgtccagagccaaataaacattggctaatgtttgagcttcaatcccttgagctgcatccacaaccaatacagcaccttcacacgcagccaaactccgcgatacttcataagtgaaatccacgtgtcctggtgtgtcgatcaaatggaaaatataggtttcaccatcttttgcggtataattcaactcaaccgcattcaatttaatggtgattccccgttcccgttctaagtccatggagtctaataattgattttgcatttctctggacgttaccgtatgagtttgttccaaaatccgatcggctagcgtagactttccgtggtcaatatgagcgataatggaaaagttacgaatcttttcctgtcgttttttcatttcttctatattcatggatacgttcctcatttcttttagtcagcttttctattataccaacgaaatgctgataattaaagtatttttcttgaccgatatctaaacaaatttgttcaggttttgctatactatagctagtaaataaattggagttgaaagaatggacaataattttcatcaagatttgcatattcgaccagtagaagaaaaagatgtcgatcagttcaatgagcttctaagctatgtttttcaaatcactgagtcggacatcgaggaaagcggttatgaaagcaagcgtgaaatgatcaaatcaaaacgaccaatcttggaattatctaaagtgttcgggtggttcaacggtgatcagcttgtttcacaaattgctgtctatccctgtgaagtgaacattcatggaactctttacaaaatgggcggcgtgaccggtgtcggaacttaccctgaatatgcgggacatggactgatgaaagacttgatcaaactcgctcttgaaacgatgcgagcagatcagcaatggatctcttatctctatccttataatgttccttattatcgtcgtaagggctgggagatgatgtcagataaattaaccttcaaaatacgtgatacccagttaccaaaaacggtggaagttccagggatcgttgaacgaaaagaggtagatgatcctgacgttttcactgtctataatcaattctcaagagaaaatcatggcgcattacagcggaccgctttccactgggaagaatactggcgctacgaaaacgaagaaagccgaacagcagctgtctattataataaaagtggtcaccccactggtgtgcttttttattgggtcgccgaagaagtctttcacgtaaaagaaatgttttacttgaatcaagaagcccgcaatggattatggaactttatctcggctcatttctctatggtctactgggtcaaaggcgatatctataaaaatgaacctttggctttcttgttggaagacagccaaatcaaagaaacgatcgaaccttactatatggcacgcatcgttgacgtaacagagtttttgaaaaaattcccctttaaagcattcgatcagccttttcatttcgttgtctccgatcctgttgctgaatggaataatggtatttttggattgaactatgctaaaggtgaagtcatcgtttcgaatgatccgatcggaaaagcggtccaattagatatccaaacgttaacttgcgtactgatgaattatcgaagacctgcgtatttggctcgaatcgagcgtctccataccgattcggatacgttacagttattggagactattattcctgatatggaagcttattttggcgactatttttaatcatgttgataaaatgaaggagaatgaaaatgaatatttactttgcagcccccctctttgctaaaagtgatctgctttataatgccgatctagtcaatcaaatccgaagcacctatccacaagcagatatctatttgccacaagaaaatgcatccattaatgataagtctgcttatgctgatagtaaaatgatagctcaagctgatacagaaaaagttttggaaagtgacctaatgattgcattattagatggtctaacgatcgatccaggcgtagcttcagaaatcggcgtggcttttgccaaagaaatccctgtcttagggttatatacagacagtcgccaacaaggagcagataatcagcaaaagattactgcactgaaaactgtagccgaaaatcaatttcattatttgaatctctatacagtcggtttgatcaaactgaatggagagatctattcttcagaaaacgctttactagaaggcttggctgcctatctcggggaggaacaataaatgggtgagaattataaacgtttattaaaactatttacactatttggcttccttgttttcgcattttctgtttgggaattctttcgaggtgtctatcctaaacagcaagcactgatttttctagttcaagcattactaggtattttgttgatctatgtacctgaattcagtaaaaagctgttccgtattcaactgcccaatgcgactatttacttttattggttctttctgttgatctcggtctttatgggaacgattttgcatctgattgaaattatttccttctgggataaagtactgcacacagttagtccgatggttctgacagcagttggttatgggctgatctgtatgttcctaaaagatgttccagtacgagaagtttctccatggctttttcttctgatgggatttgcttttgcaggcctgtgtggtgttttttgggagttctgggagtttatctgcgattcgcttggtggaatgaatctgcagcgctatgcgacgctagaaggcaccccattcattggccgcgaggcattgatggatacgatgggtgatcttttgaccaacacgatcggagctgtattgatgggattgattgcttacttccaagggcgaggcaagcctgattattttgaaagctatcgtatcaaaaaaattgaacagtgatttttatcaactgtctgaactaataaaattagttcagacagtttttttatccgaatgatttcgcaaaaactaattttgacaatgatctttttttagcaaaaatctcccaaattcattgaacccgctttcattaataaaggaataaacgttatttaataatttatgttattggacgagtcctctttataccaataattgcaaaaagaattgcctgaaatgcagtgtatttgatttcacgattttcaaaaggtctgttataatatttaacaataagtcgacctggaagtcagtaaggagatcgccatgattttgacggtattttttcttttgtgctgcatgatcttttcatctattacctatgccttttctaaagatgcacgaaaattcgtccaacccctgcctattaaaatcattttcattgcttctgcggcgattgccgtttggacaatgttcttttccgtgattgcgctagtagcttgggtcgtttaaaaaagcattcttgcatgtttcgagtgaagactcgctcctgtgcaagaatgcttttttactgtgcttttaaaataatgaaatttcacttaatggccagtaacgcaagataacttttccttgcatttgatcggcatccaccacaccgaaagaacggctatctcttgaaatcagacgattgtctcccataacaaaatattttcccttagggacggtaatagagaaatcttcagtgaattgggttgcactggccgcgatttgctggaataattcccggtagctatattccttttgcaactgatcatccgcaaattgcttcttaaaatcttctaagtactcttcgtgatactctttgccattgattgtcaggacgtcatttttcatctcgattttatctccaggcaaaccaattaggcgtttcaccgcaattttactggtatcatccggttctacgcaaataatcacgtcttgccgctgataacttgaaatcttggaagcaatcaagcgttgcccatcagacaaagtcggatccattgaatgcccgctgactttgacaggcgttaaaataaacaatcgaacgacaacaatcaccacaataaaagcgagaataaaccaattctcttttaaaaatttctgcatcttattttatttgctccttcaactattttctcagtagatccttcattagaaaatagacctgcgttttgcgtttacttctcaatcttacgtttaatttgccttttcggcaagtaaaatctttttacgaaagtttttttttaggagaaatttaccaatctttgtttaataaaaaggaagttcttaaaccacattgacgtagcataataacatgatgatttttttattcaaaagaaaaaacctgaaaaatagcggaataggcagaagactttattcaggtctttcccacagtatcattccgtctatcattcaggtaattcaagggttatttttctcgtttaagttagatgactaagaaatctcttattcacttatcggtgtattttcaaaaacaagctggtcattcaacacttctatcgtcacttttgttttcggcagaacacgtcctgcaacgatttctttagccagaggtgtttctacctcccgtgtaatgaaacgtcgcaatggtcttgcgccataagcgggttcgtacgaatgctctgcgatccattttttggcttcttctgtaatggataattgaatgtcttgattttccaatcgttgagacaattgagcaataattttatccacgatacctgtaacattggctaggcttagtggcgtgaacaaaattgtatcatcgatacggttcaagaactctggtttaaaatgaccgcgtaatagcgaacgaacattttcagccaccgattctggaatcgttccttccccagtcacaccatctaatagtatttgcgagccaatattgctcgtcatgatcaagaccgtgttcttgaaatctaccactcgaccttttgaatccgtcaatcggccgtcatccaatacttgcaataaaatattgaaaacatctggatgggctttttcgatctcatccaataagacgatcgtataagggttacggcgaacagcttctgtcagttggccaccttcttcaaaaccaacataacctggaggtgctccgactaaacgtgacacagaatgtttctccatgtactcactcatgtcaatccgcaccatatgatcttctgaatcaaacagattgacggctaacgctttggctaactcggtcttaccgactcctgttggtcctaagaataggaaagaacctaatggtcgatttggatcttggagacctgcacgggaacggatcaccgcatcacttactgcatcgactgcctcgtcttggccaatcacgcgttgatggagtgtttcattcaatttcagtagtttttcccgttcgccttctaccaatttcgcaaccggaatgcctgttaggcgaccaacaactagtgcaatttcgttttcagtcacagattcttgcaccattcgaacgccttccgcttggttttttgcttccaattcggcaagttctttttctaattgcggaatcgttccatggcgtaaaacagcagcgcgctctaaatcataattattttcagcatcttctaattcatgtttggctttgtcgatttctgcccgtttattggaaaccgcattgacttcatctttctcagtttcccattgcatcttcatggtattggcttcttcccgcaaatcagctaattcttcttgcaggtttgccaaccgttttttagaagcatcatccgtttcttttttcaatgcggcttcttcaatttccagctgcattaaacgtcgcgtgacttgatcgagttcagttggcattgaattcatttctacgcggatcgttgcactcgcttcatcaatcagatcgattgctttatccggtaaaaagcgatctgtgatataacgatcggataatgtcgctgcagcaactagtgcattgtcatgaatgttgaccccgtgatggatctcaaagcgttcttttagtccccgcaagatcgagatggtatcttcaaccgttggttccttgactaaaactttttggaaacgacgttccaaagctttatctttttccatatattgacggtattcgtccaatgttgttgcaccgatcgtatgaagttcaccacgagccagcattggttttagtaaattaccagcatccatgctgccttccgttttgccggcacccacgatattgtggatctcatcaataaataagatgatccgtccttcagatttcttgacttctttcaagaccgccttcaaccgttcttcaaattcaccacggaattttgctccagcgatcaatgcgcccatgtctaaagagaaaatcgttttgtcttttaagttttccggtacatcttttctaacgattcgttgcgccagtccttcaacgatcgctgttttaccgacaccaggctctccaatcaaaacaggattatttttggtttttcttgaaagaatacggatcacatcgcggatctcttcatcccggccaatgatcggatccatttttccactgcggacttgttgaacgaggtccacaccatatttttctaaggctttgtattgttcttcttggttttgagatgtcacacgttctccccctctcaaagattcaatggttgcttttaattctttttcattgattccttgaccttttaagtaattagtcaatggatggttttttagtttcattaatgcgagtaaaacgacttcagtcgataaatactcatcattgaactctttttttagttggtctgcttcagaaagcaaacgaaataagttttgactcatgctttgtccgtattgaacattgccaccttcaacagatgggatttcatccaatagtcggtcaacttccttctcgaaagcatcgacatcaagaccagcatccgtataaaaattgcggccaaattgattggcttgcaataaaattttccataaatgagcgatatctatctcctgatgatggcgtgttatcgctacttgttgtgcttctgcaatggcactttgtaaagttgttgtcattttttctgggttcattgttctacctccccgtcatttctaggatttctcctacattgtagtataccattttggtcagtaatggtcaaaagatatgcaagcactttttgactttcttttttagcaaactatcagcaaaagttgacataaggaaagctaagatggtatgcttaatgaaccatttcaacggaggaaaagcagatgtcacgctactattttaaatttatctttaaatttatcagaaaatctgctcttaacaagaacacgatgaagcattgttaagagcctacaagcgcctagcgcatctgcttcatcaaagactcggagtgaggtttctttctcatgccctggtttttggtggatactaaaaagattgtaagctgtagacaatgactgtctatggcttttttatatggaggaaaatcatgttaacactatcaaatctatcgcaacaattcggcgacaaaatcttgtatgaagaagtcagcgttcaaatcaatcgtggcgagaaagtcggactgattggacgaaacggtgccggaaaaagtaccttgatcaaaatcattaccggggagattcttcctgatgaaggccaggtcactttcccaaaaaatctgaaaatgggctatttggatcaatatgtcaatgtggacgaaacccaaaccattcgcgatttcttacgctcagcctttgctgctgattttgaaaaagaggcaaaaattgcttcactatatggtgaatatgctgaaacattggatgatgagttacttgaaaaagccggtgaattacaaaatcaattggatcaaggttccttctatcaaatggacacactgattgctgacttagcggaaggtctgggcattgccattcttggtatggaaaccccactggtcaatttaagtggtggtcagcgatcaaaattaatcttagcaaaaatgttattggaaaaacccgatatgctgatcttggatgaaccaaccaatcacttagatgatgagcacatcaagtggctggttcaatttctccaagatttcaatggcacctatttggtggtttctcatgaccaacagtttctcaaccagatcacgacgcatatcattgatattgaatttggcaaattaacgaaatataccggcaatcttgaaaaatcactgaaactcaaagcgttgcaaaatgaaagttatttgaaacaatatgaagcccaacaggcacatatcaagaaaacggaagcctatattcgaaaatataaagcgggctctcgttctacgatggctaaaagccgagaaaaacaattagcgaaaatcgaacgattaacgccaccaacagatgcgccgacaccgcatattgcttttccttatgcccctatcgtcacaacattggcgttggaaacaacacacttagaaattggctatgacaaaccgcttttgtcaccgatcgatttgacgatacgctacggtgaaaaaatcgctattcgcgggtttaatggaattgggaaatcaacgttgatcaagacactcttaggtcagataccggctatcaatggatcggtttcatttccccaacacacaaaattcaattatttctcgcaagacttaacttgggaacaaccattacaaaatcctttgcactatatgagcgataaatttcctaaagctacaatcaaagaactacgccgccaattatcccgtgcaggattgccgagtcagctggcacaagaagcgctaaaatcattgagtggtggcgaacaaacaaaagtcaaacttgccgaaatgatgatgatcaaaagcaattttcttctattggatgagcctactaatcatattgaccaagcaaccaaagataatctgaatgcagcactggctgattttcaaggaactgtcttagtggtttcccacgaagccgatttctacgaagactttgcagatcgaattattgaattaagtgaataagtacgacactaaaaaatctcgaagaagtgccgaaatttcagcgaactagctgaagtttttgaggcatgccttcgagatttttttaatttagatttaataggagaaagaaaaagtttcattcctttgctcacgctttttcgttcttcaactcttccaactcagcactcatggttttgcgtttttccaaaatgacatagacgaaaccgatcacgaatggccaaataaaagtagcaaatcgataaagcaacatcgatgacgctgcatcaacagtccctaccattggtccaaaaagtaacatataaacaaattcaaacgaaccgattccagccggcgtaggaataacacccgataggatcactgcaaagctgacaaaagaaagcgtcagtaagaagtcgatttctggatgtttaggtgccaatactacataaggaatcacataccaagcagccaatttaacgacattccagaaatagatccgtaaaaaagccgtacgatcacggagaatcgaatagactgtctcccgtaacgagtaaatctgcgtattgcaagtatcgatgattttgcgcatgctcttacttttgaaaagtttgtcgctgattaccacaaaagcgacttgaacgttgacacttacagaaagtgcaagtaaaaaggcaataatcagaaaagtaacgaccataccagctaatatcacccaaatcatatttggggctttctcaaagaataaagaaaattgaatcactagccctgcgatagcataagtcaagaccgccaatttatacatgaccatatgcaacgtagtcacacctacaccttgtgacaatttcaatccatttttacgataaaaattgacttctgatatcaacgtcccagcaccaaaagtaataattcgatagaatccagagtaacaaacggtaaataagccgtctttcgttgtaaactccggttgaaatcctacagcgatctctttgacggaacgtccttcaataaataagtaaattgttcctaacgccatcactgctgtaacgatcgacagactggtttgtcttaattccgccaaaatatcagtcatagagctgcgaataaaatagtacatcgcacctaagatcacgaccattaatagcaggtttaaggcaaatttcacttttgctttcatttttaactccttaggcaaacttaataaacaatagaagatctacaatcacaccgaaagcaaaaaaaatataaaatttacgtttgcgtgttttatggtgaaaaacgcgttgcgcgatcaatccaccgattccgccgccaatcaatcccataaacaacagattccattcagggacacgccatttttttcttacggcttggtatttatcataccccatcaagccaaaaagataaagattcgctataagtaaataaaaccacaatggattttgtataaattctgtcatcatttctcctctggttgatattatttagcatccaagtcttcttcttgaacacggacacgaagggcctgtttcatcaccttcattttaacaggcagattatctgtcggatcgccatcagttcgtgtataaacagttttttcctgagcacgaatctcaatttcatttgcagtaaagtactcgacacctggcactttcgcaatatgaccacgtatgatccggggcaaataaataatgaattccaatagattgagttttggcaataaaatcatgtgaaacagcccgtcatctggtcgtgccaactcgtcgaaattggtaaatccgccagctgaattggacatgactactgttaacaattgactcttgccacgccagcgttttccgtctgcaataatttctaatttgtattgtttctttttgaataaataatggaaaaaccgcttggtaaaagcgagtggtccgaactgttgtttttcttcttgcgaagtagccgctgccgtatcggccagcaatccgatggtcatcgtcgagatcatcatggagtcattgaccaatccataatcaatttgtcgatcagtcccattcaatatcgtttcaaatgcttcttcaggtttgagaggaatccctaacatacgggcaaagttattgaccgttccgcctggaataattgccactgtcagcttatctaactgatccacaaatgtttgcagcgcatgatggattgtaccgtctccaccaatgattgcaatcgtatcgatttgatgttctttcgcatttttttggattgtttccggctcaatatcaggattggaaggttgcaagactgcttcacttttaggatcatgttcttctagatagttcttaaaagactctgcagtatccttggcatcgcttttaccagccgtatcattatataaaaccatgatcttcatatttttcacttcctaaataaaatagggctgcgaatggtgcagacttctgcatcaagtctcagcccattattcaactcatttttcattatcaagcgatatttttccacttgaaaacgaaacaaaataaagttctactgtgcgtttttttcggcaatcttcacgattacatcagttgcttttttcattgattccaaggaaacaaattcatagcgtccatgcatattttcaccaccggcaaaaatatttggtgtcggaatccctaaataagagatcttcgatccatctgttccgcctcgaactggttcgatcactggctcgatacccagatcttccattgcagacttagctaactcaataatactcatgtctttttcaatgatttctttcatgttgtaatattgatcatataaatccatttggattcttgcttcgtcaaattgggcattcattttttcttggattgtaagcaattgttttttacgattatcaaacgtttcacgatcatgatcacgaatgatatacgccatttttgcttcttcgacggttccgttcaacgccatcaaatggaaaaagccttccgcaccatcggttttttctggcacttgatctgttggcaattgattatgaaaatcaatcgccaattgcaaagcattgatcatcgtatcttttgcggttcctgggtgcacatttttcccttggatcgttagttcagcttgtgcagcattgaaagtttcatattgcaactcacccactggaccgccatccatggtataagcaaaatcaacattgaaatcagccacatcaaatttatcagcccccaccccaatttcttcatctggtccaaaggcgattttgatttctccgtgtttgatttcaggatggttaagcaaaatttccatcgccgtcaaaatctctgcgatacctgctttgtcatcggctcctaaaagcgtgctgccatctgtcgtaatcaatgtttctccacgataatttttcaaattaggaaagtctttgatattcagtgtaaatttgccctctttatccaatttgatcgttgactcaccgtcatagttttcaataatttggggatccacattcaccgcgttaaaatccgccgtatccatatgtgcgataaatccaatggaacgaactggttcggaaacattacttggtaacgtaccaatcacaaaaccattttcctcattataatggacatcatgaagtcctaattcttccatttctttttgcaatgtcttggcaaacgccacttgcgtttgtgtggagggtgttgtttggcttgtcgcatcagaacgagtttccgtctttacatatcttaaaaaacgcggtaataaattttcgtacataattgatcactcctatttatattggaatggatttgtggaagtctctgaaggaataaagtctacctgccaaccttcttccgctttccattcattgaattttttgataaaacgagggatacattcccgttcaatgttatgacctggatcgattgccgtcaagctgtttgcttgtatatcatgagcggtgtgataactgatgtctccagtaatatatacatctgctttggcattcacggcttcttgataaaactgttcgccactgccgccgcatatagcaatccgttgaacgttttgccgctttgcttttggttcgatcaaacgcaacccctctaactgaaaaacacttttgatttcatcgatgaaatcttccaacaaaacaggtgcttttaattgacctactcgcccgatcccataatgctgagacaagttatccaaggaataaaggtcataggcgggttcttcatagggatgcgcctcaaccatcgcttgcaacaccttttcggtgatggtttctgggaaaatcacttcgatttttgcttcttgtaccgactcttcttccccaatttcaccaatcgcaggatgcgcatcctcttgaggagtaaaacggccggtaccaatcagtgagtagctggtgttttgataatttccttgctgtccagctccagcttttcctaaagctttcctcattgatgcgccttgctcaattggaacaaaaacagccaattttttcattttgattgtatgggtgggaacgagatacgtggtttcttctattccaagcatttcacaaaaccagtcattcaacccatcatgaataatatccatattcgtatgcgcagcatagaccgaaatattatgtttgatcagatccatatacattttttgttgcggatcatcggctctcaaacgacgtatggaacgaaaaatcggtggatgtttggcaacaatgaagtctacttgtttttcaattgcttctgcaacgacttctggacgaacatctaatgtcatcattacccgttggatctcgttgtccaacgttccgatatgcaatcccactggatcaccatcttctgctaaccattgcggacaatatctttcgaaacgttcaataaacgttctagctaacattattccagcacctccttgatccaatcaatctgttcgtttaactcacttattttatcttgaggaggaattgccgctttctctagttcttgcaaaacgatttctcgctgctgtaattcatgggcccattttttataaaaaacgagatttttttctttcaataaacacgggccaaaaaataattcttgtggtgtatagattttactgccttcttcagctacgatgatttcgtagtttttatggttttcttcaatcagttcttcgtgtaaaatcatgtaattattctcctgaagccattctcgcaaagtccgctcccccacattgggttgcaagacaaggcgctccttcccagtaattttctgctgagattttccattttctaaaattgttcgaatcaaagtgccacccataccagcaataaccaccgtatcaatctgatcatcaggttggattgcagctaacccatctgctaagcgaacagtgattttgtcgctcaagccattttttttgacttgccgtgaagcagattcgaatggtccttttacaacttcacctgctactgcatactgaattttattttgtagcatcaatgccacgggtaaataggcatgatctgatccaatatctgccaagcgggcttgatccggaatctgttcgccaacacgagtcaatcgcagggataatgattgttcgttcataacgtcactccttcagaaatagtatatcattctttattgcattttaaagggagagtttttactccttttatttacggctttacttcgcctagagttgcttttgcacttttcgtaaagaaaacttgcatatcttgcttttcaaaccaatcgttgtgatccatatgaaggttactgcgctcccgtcacccagttgagtatcaatcgcagtgattcatacgaaggttactactctcccttcggtcgcctagtactgctcatcatctgctctgtcttgcttcgcaagccaatcgcagtgattcatacgaaggttactactctcccttcggtcgtctagtactgctcatcatctgctctgtcttgcttcgcaagccaatcgcagtgattcatacgaaggttactactctcccttcggtcgtctagtactgctcatcatctgctctgtcttgcttcgcaagccaatcgcagtgattcgcagcaaaacgcgttgtccgttgggacaacgcgtggggttattgcacgatttcaactgttttgattgaatttcctggaacttgaggtgggattgacatagtcattactggcaagcctgacaatgtgacttggaccgttgttcctttggtcaactcagaaacttgaccttcaaatgattcttgcggtgcgtgtaggatcacgccgtctgtttgaaagttaggaacaatcgtttcttgatcgtcgactgcttcgatatcatttagaaaaatctgtatcgtttcgttgtcgccagctgttgcattttcttgaagaactcctgtaaaaatagtcgttgcctcgctttcgacagtgctatttgttgtgctttcatcgtttttagttgtttcactcatcgaatcattatctgacggcgaaccgcaggaagctaataataaggttgtcaaagccaaacctaaaatcgtcaatttcttcataagaagttctcctctcttctatatttccgaattccggcgatttttgccagtcatttggatctcttttgtcaagtaacgaattcgttccatgatccgcttggctttcaatggctctgattctccacgttgagtaacggatagatgcttctctaactcttgcatggaaaagttggaggaaaagaacgttggcagttgttcttgcatccgatattgcagaatgacaccaaagacttcatcacggatccagctgctcatggcatctgcaccaatatcatccatcattaggatgggggcttttttaactgcattgagtttgtcgccaaccaagtctttgccgattgcttgtttcatttcgacagcaaatgtcgggaagtgaacaagggtcgtcgtataacctgcttccgcaaggtcccgggcaattgcccctagtaaataagttttgccgatcccaaaactacccaccagatataatcctttgtgaaaagcccttggatcgttttttaggttttcaataaactcgactgcagccatcaaagcttcgccccggccgggagtactttcatactgagcaaaattggcctcttgaatatctttcggcatatccattgctttgatgcgactacggatctcttcttgtcgttgatgcgctaaaagctcttgcgtgggcacataagtgacatcgataaaatgaaagttcaacgctagtcgtggctcatatccaggtgcaatcatcgtagggtcattcaaacgaaactttcgtttttcttgaacaaattcatagagtttcgcataacttttttggatatctgcatctgtcagttcctcccgatgttctgaaatgaattctttgacatccggatctttcaatacgtcccccatcatttctgagaaacgatcgcgatagtttcgtttgtctaaaatttttgatagattcttcccaacatcttccattaattgtcacctgctttcttttgcaagtaggcttgcagttttttgtcgatctctgcctgacgttctggggataatgtcgtttcttcaactggtttttcggcccagcttggcagtttttcttcacgaatgatctttttagacgggctttgcggccgtgtgcgtttttcttttgcttctttaactaagtcccgtacatgcttgatcgcttcttccgcggtttttacttgcaattcagaccattgtgccgcaatgttattgacataacttgctggcaaagccgcattgttctgtaccactaacacataatgaataagaacattgatcacactattggataatggcgagcgttccactaagctttttagcagccattgttcggagtctgtgacaaagctctttttttcagctttgattgctttcaagaatgccatcggcgcattattctcactttcgcggatcaatgctagatcgttatcactatacccattttgttttaatgtattaaatcgtcggatctcttcatctgaagtgggatccactttattttcagttttggtaaaacgcgtccgtgctttttgtaaaatcaattgttctaatgccttctgatcgattttcccagtagttaaagaaaccgaatctgtcatcagatccaacagctccatcacatcatagccgtataatgaatgatataggagtagtttttgccgaaaatctttatcgaaattgtctgcacggatgtagcgacgttgagcttcataaagaagaaaatcccaatctagttgttgttcatctaacaccagtctgctttgagtgtcttggaatttgccattgacttcctgtaattcctcttcattggctgcaaattgttgtgtatccaagcgataagcatccataaaagaagccgtaacttcttgatagccttctgcttgccattttgctggttggaacaacgaaacaagttgtcgaaactttcgctctccaacatggttaagcaataagaaactatagagttcatcttgaaagaaatcgctcgcatgaactggctcttgcaggtgatacaaaaatgtgattcccaactcgtcatcttctttttcaaacgttttgagtaagccgattccttctaacttatttcgtgcttgaataaaacgctgtaaccctacattcatcgcattcaaaatatctagatgaataaactcactttcttgcggatcctgctgatccgcagtcagtgtcagatagagtgctaaggcatcactttcgatgattggctgataaagatgaatcagcgcatccttcccttcagttgttagtggacgacttttgaagacacgatacaattgatttggtaatatgttgcccaccattcagggacctcctattcctcttgattgtctgctgtttcttgcggatcacttggttcttttgccttttcaacgatatcctgcaattcttttaagaagactgacatatctttgaattggcggtagacactagcaaaccgaatgtaagcaatctcatctaagtcgactagatcttccatgacatattcgccaatcatcgttgtcgaaacttcattttcacctagtgctcgcacacgattctccacatgatcaacaattttttccatttgttccattgtaacgggtcttttttcagcagagcgtatcaaccctcttaatatcttttcacgattaaattcttcacgagcgccatttttcttaataactaataatggtgcttcttcaattcgttcaaatgtggtaaatcgataaccacagttttcacattcgcggcggcggcgaatcacgcgaccatcgtcggcttggcggctatcaatcactcgagaattgttatgatgacattttggacattgcatagttccaccccgttctctcttccgtgtctcgaatgatagcgagacagcgatgatttatatgcttaattataacatgaaattcttctatctaataggtaaagtctttcaagcgaaagaaatattacaaatttaaataatgtgacggttgtttttttagccacaaaagaaaaacgacagaatcaattctgtcgttctcctccttatctcatttgtaacagtgacacaaactcatccagagtttcccgttgttccatttgttggttgcattgctcactgtcgcgacaaatgtaatttcctcgtttggtgtatgttccatcgccaccactttttgtcaacgataaaaacatggagacagtagactcatgttgacataaaggacagattcctttttttacttctgtagataaatgaccatagattccttggtagcctttttgagtatttacgatcataaatttactttgactgccgatgtcatcccaagccaaatacgtataatcacgaaggtctgtttgggaaaaatcaggtacttttaatttttttactttacgaaacagtttctctgtttgtttgactgaaggcacttgaaaaggtcggacattcttttttagtgcttcaagaatggtcaagctctttgacatcgtcaaagatgaatcaaaaaattgacgaatcagagactgtgcttctttgtcctcctcagaaaaaaatggttgaatggcttcttcagttaacatttcaactgtgcgaatcgtatggcgatcattaacagactgataagtccgaactaattgttggacttgatgtttgatgaaatgaaattgatagggttcaatggtaatcataatagatatcgatcctctctttaatgaaaaaacaaaagatattactgataaattcctctgatcacagtcaaggacaatgcagaattcagcatttgttgaccacctcctggacttcccttttttgtggaaagtcattggctattatagtttttccttcaggggttgtcaatcattgtccgcagacagcattcttttcttgtcaaagtggaattattgataccttttaaaacaggattttcttcttttttatctatttatattgattgacgaatatggtttatcataaaaaaaactccagatcctgtctagagtttttcttcgattcctgtataatgtttcaaatgatcagcatcccgtcgttcggttgaagagatctttgcagcatctgtgtcttcattttcgtttagcaatcggtcccgaccaagtgtttctaatgttttatcacctggttgagcatctaattcatcatgccgatcctcaatttcgtctacctgttgttgacggtgatcttttttggcttttgcttcatttgcctgttcttttccttcttgttccattttttcattattgatccattcaccaattttttcttttgcagaaccaacaattacatctttttcgtctttcaatgatcccatgatgattcctccttttttattagcatagcaagaatttcttcgattgacaaaagatacgtatgcgcttcatttaaagatatggtatactgaatcaaattttcagaatattctttgacaaggagcagtttatggacatcttaaattttgaagacatccagttggttcgcaagcaaactgttttgttgcaagacatcaactggcaaattgctaaaaatcagcattgggcacttttaggattaaatggtgctggcaaaacacttttattacaactgatcattgggatgatctggccgacttctggcaaacggcaagtcctaggtcaagtctacggaaaaacatctgtgccagaccttcagcgcagaattggttggataagtgcgaccttgcaagagaagattcctgctcaggagctctcagaaatggtcgttctatcgggaaaatatgctagtatcggtatatatgaagactaccaaatgaaagacttgaaccaagctattgccattctttgttcaactggcggcagtcaactgattggccagccatttcatcagttatctcaaggggaacgtcaattagtcttaatcagccgcgctttgatggcaaatcccgaattgttgattttagatgaaccttgtaatggattggatctttttgctcgagaagaattgctaagtcgaattggcgagatggcgcacaaggaatcacctacgttgatttatgtgacccaccatacagaagagattttaccgatttttgaccatatcatgatgctgaaaaatggtaaaatccacgcttctggcaagcgccagcaaatttttaacgaaaaaacgttatctgctttttatgggaaacctgtttttttccatgaagtcacttccgatcgcctggcagttttaccaaaaagcaactcactaaacaaaaaatgaaacaaaaaaagagacagcgacaaccaaagcctctttccagatatcctttctaacttcagtttccagtaaacgacaaaataatgcgtcaactgttagcttttcagaaataaagggggctcctttgtgccggtgtctctgtcttaattctttcttttagcaagccattcttgtacttgcgtcttaacttcttcaatggttccttgattgtcaaagaggatatctgcccgtttgcgcttctcttctattggcatctgactattgatacgttgttgggcttcgatgctggttaaatggtctcgcttcatcagtcgctgcaactggatcgattccggaagatagacgaccgctacttgatctatcagggattcataaccagtttcgtataacaaaggaatatctacgatcacaagatcagcttttgctttcatgacttcaatctgtcgtaggatttctttacggataaagggtcctaatgagcggttcagcaattcccgtttattgtcatccgcaaaaatgatttttcctaattttttccgagctagtgtcccatcgggattgatgacctctggcccaaaaacagttttgattttttcaagccctggcatccctggctccaccacttcgcgagcaacgatatcagcatcgatgattgggataccagcttcttcaaagcacttgacaacggtactcttgccagtagcaatcccgcccgttacacctacaaccaagctcatctttctgtccccgcgtgtaattgctgacagaatggacaatagtgggtccctcgttgtgcaacttttgtttttacgatcggggtaccacagcggacacaaggattgccggtttgaccataaacgtgtagagagacttggaaatgccccgcttcgcctaacgcattcaaataggtccgaatcgttgtgcctcctgcctccactgctcgggctaagacatcaatgatcgcccgatgcaataagttaatttcggcttcattcagtgtcgctgccgattgctcgggatgaatctttgcttcccataaagcctcatccacatagatattgcctaaacctgtcacaagcttttgatctaaaagcagcggcttgatggttttttttgatttctttaggtcacgagtaaagtctgtcaacagaaacagttccggcaatggttccggccccaactgcatgattcctttatacgtactgctctggtctttttcaactaaagtcatacgtccaaattttcgcacgtcccgataatgcaattcactgccatcagtgaattgaaaaatcacatgggtgtgtttgtccggcaccccttctttttcaaaaaattcatacttgccttccatgcgtaaatgggaaatcagatcataatcggtcaatttgaaaatcaagaatttgcctcgacgatcaaaagcttgaaattgttgtccttttagcatcgctgcaaaaatcggtacttctggagattcaatgatccggggccaacgaatctccatttctttgatcgttttatttaaaatcagtttctctagtcctctgcgaactgtttccacttctggtaattccggcacaacatttcacctcatttattttgcttcataccacgttttgccccagttactatctgtcaacaatggcacatgcagtgagacagcattttccatgacttctttgacaagagcatctaagcgttctaattcatcttctggtacttcgaagacaagttcatcgtggacttgtaaaagcatcgttgcttgtaatttttcttcctttagacgacgatccaaatcgatcatggcaattttcaaaatatctgcagcactgccttggatcggtgtattgattgctgtacgttccgcgaatgtccgcaaattaaaattgcgggaattgatatctggtaaatagcggcgacgatgatacaatgtttccacatagcctttgtctttcgcttcacggacaacttcttccatataagttttgacccctggatatttttcaaagtaggtatcaatatattgctgcgccgctttgcgagtgatcccaagattttgggagagaccataatcagagataccataaacgatcccaaagttaaccgcttttgcttgacgtcgcatgtttggtgtaacttcttctggagtggagatcccaaagactcgcatagcggtacttgaatgaatatcttgtccttctacaaaggccgcttttaaatgctcatcattcgagatatgggctaaaacccgcagctcgatctgagaataatccgaagaataaatgacccaatctttggctcttggaacaaaggcttctcgaattttccgcccttcttctaatcggattgggatattctgcagatttggatcaacggaactcaaacgtccagtttgtgttaaagtctgcacgtaacgggtatggactttgccatctccttgaatcactttaagcagtccttccacataggtggattggattttggcaatttgacgatagatcaaaatgtcttcgacgatcggtgcctgttccttcaactgttccaaaacatccactgccgttgaatagccagtcttagttttcttgatcactggcagccccattttttcaaataaaatcacgcctaattgttttggcgaatttaaattgaactcttcgccagcttcttgataaatcttttgttcgatttcatgcaaacgttctgcaaattcgcccttcatctgatgcaaacgagaagcgtccacgcgaatcccagtgatttccatctctgctaaaatttttgataatggcaattccatatcagtaaagagtgcagtctgatttttctctgctagctctttcgccaaacggacagaaaggtagttgatcgccgcaacttttcgagctaaatgagcgaaaaagacttcttcatctgccggtagtcctcgtttcacacctttgccatagatagcttcgtccgattgaatcgcatcaaatccataatgcttagcaacaccagcaatatcattatttgaatcattggtatctagcaagtaagcagctaataatgtatcaaaaacaatcccttgtggtgcagccgcataacgattcagcgccacatacgttcgttttgcatcatagactttcttctgtgaagaggcattttttagccaagcaataaaatactcattttcaaagagatcatcttgattggtcacataaattttttgctgattcccccaagcgacaccaacgatatcttctaaatgatagttatcgcccagcatctcgatataaagagccatatcctcagtaaacatttccggagtgacctctgttacaacgtcaaaaagaatatcttccatttcttccggttcagtcaccacatttaatttttccaagaaagaattgaagttcatttcttgatagaatggaatcaatttatccagatcttttccttcgtacttcaatgaatcaatggccacatccactggcgcatccacatcgatcgttgccaatttttttgacaaaaaggctgtctctttatcattgagcaagttttctttcatcttgcttggcttcatctcatcgatatgctcgtagattccttcaactgaaccatattctttcaaaagtttgatggccgtcttttcaccgatttttgtgacaccgggaatattgtcagaggcatctccagctaatcctttcatatcaatgatctgtaatggcgctaaaccatcatatttttctgcaacgtgatctggcgtataactttcgatctcgctgacaccctttactgtgatatcaaccttcacatggtcggtagccaattgggtcaaatcgcgatctccagataataccacaacatcaaattgctctttgtcaactttttgtgccaatgtgccgataatatcatccgcttcataattgtccagttcataatactgaacacctaaagcggtgatcaattcgcgaatatagggcatttgttccttgaattctccaggcgtttttgaacggccgcctttatattcctcatacatcgcagtccgaaaagttgttttgcccgcgtcgaaagccaccaggacatgagttggctgttcttttgccattacattttcaaacatggtgtgaaaagcgtaaatcgcattggtatgcaaaccattgttgtttttaaaacgttccaatgaattgtgcagtgcaaaaaaagcccgaaatgcgacactatttccgtcaactagcaataatttattttttgtcatttgaataactcctcacctcaaaagttctctcttattctatcaaagaaatccatgaaaagcgatggattgcctttgttcgattaagccaattgcaaaaaaaaatgcgagtttcctcgcatttcctcattagttgtttttaccaaagattcgcaaaatcgctaagaacaagttgataaagtcaagatacaactgtaatgccatgaagacagccattccagtatttgcttggccattcgttgcttggtatagattacggatctgttggttgtcataggcagtgattcccataaagacaaatactgtcacaatcgacaagaaaaagtcaactggaccactatgcaaaataaacacattcagcaatgtcgaaatgatgatcccgatcaatatgccgtagccgattcgtcccacaacacttaaatcacgttttgtcatgataccaaatgctgacattacgccgaaagtgatcgctgcggaaacaaatgcacctgcgatcgatccgaagtcataatacattaatgtaactgacagcgtcaccccatttaaaagggagtaaaccagatatcctgctatggtcagcgaaggattcttttgcgcttttgcgcctaataccaagaccaaaataatttgaaggatccataaccctgtaaagcctagtggaaaattacggataaaattcattgtttgttctgcaaatacttgtccgaaaaagtaggcagacactgcgctaattcctagtcctacagcaaaaaatagatagactttggaataaaaacgattgagcccttgggcattaactacttcattgttcattttcttcaccttcctctacgatttttggaggttggaccatcactactgcatccaacacacgatcttcttgcgtattgacagcttcaacagagatcgtcactacgtctttcatcttatcgactttgatcacttcgaaatcgaaggtcaacgtctcataatgaaaaacaggttcaataaagttcaccgaaaaattcaccacatgagaacctggtcctggcaaatgtttagaaatcgcacttgtaataatccccatcaacattaccgaaggcacgattggccgttggtattctgttttttgggtatagtcatgctgaatataaagcggattggcatcatttgtcaaaccgagatacaacaaaagctgactgtcttcgatcgattctgttaaagataacgaatcgccttcctcgatttcatcaattttcttacctaattttcgcggtttaccaatgttcaaatttatttcctccaaaataaataattttactctgatttcattttatcagatgcagataaaagtgcaagttcgtggtgcgatgtcccaaaaaagcaaaaacggggcgctgacttttgtcaaatcgatgcgagcaatagcaacgaaggctaaatagtaagtctcactggttgattttgtatcatagttctgttgacagccagtgcaaatgagataccatttgtttcgttgatctgctcgggtgatttgatttggtcatcgctccgtattttttataacacgtttcgagtcgtattactcaacaacttttcataggctgattcaaacttttgtacgtccccggcacccatgaaaatgatcacagcatcttgatgatccaataatggtgacacattctcttctttgatcacttgtccacccttttgaatcttgttcccaagatcttcaattttcacatcgccgcgagattcccgagccgagccaaagatatcgcatagataaacgctatcggctagatccaatgcctctgcgaattcgtccatcaatgcaatcgttcgggtaaaggtatggggttggaaaacagcgataatttctttttcagggtatttttggcgtgcgccgtcaattgttgctctgatttctgccggatgatgagcataatcatcaacgattgtcatatcagcgactttcttctcactgaaacgacgtttaacaccaggaaatgacaacatttcttccgcaacttctgtcatatccagcccttctttataggctactgcaatgacccctaaagcgttgttgatattatgttggccaaatgccggtaacacgaaatgaccgatattttcgttatggatatagacatcgaactcagaacctgtcgttgtacgctgaatgttttttgcttgtacatcatcatcatcattcacaccataataatagatcggtacatctgcttctaattttcttaaataggcatcgtcaccaaacgcaaagattccttttttgacttgcttggccatcgattgaaaagctgagaaaacatcgtcgatcgattgataataatcagggtgatcaaaatcgatattcgtcatgatcgcataatctggagaatacgctaaaaagtgacgacgatattcacaggcttcaaatgagaagaactctgcgttagggtctccatgacctgttccatcgccaatcagaaaactagttggacgaacaccgctcaacacatgggacaatagacctgtcgtactggttttaccatgagaaccagtgactgcaatacttgtgtaaggttgaatgaatttaccaataaaatcatggtaacgcgtaatttctaaccctaattccttcgcacgaaggatttcttcgtgggtatccggaaaggcatttccttggataatcaccatttctggctgaatattctctttatcgaaaggcagtaatgtgattccggctttttccagatcacgctgtgtaaagaagtactcttccacatctgaaccttgtacatgatagcccttttcatgcagaaccaaagccaatgaactcatgccggaacctttgattccaacaaaatgatatactttgtcttgattttccattttttaaaatcctcttttctcaagttcacattacaataaacgcatgtttattaacatttagatttgttgcacgtcctacattatcatacaaaatgaaaaaaatagcaacgagttttgtttttgggcttgactttttgctcaaatcgctatttctttcaagcgtccgcgacactttccacagccataacgtttagtgttcagccttctcgttcgcttgatcacagctccacattgttgacactggtactgatacttcgcatttttcatcatacttggagcataacgaagtccaccagtagctgccaaaagagctttgaattctggatctcggtgtcggtagcctttgccagctaaatgcagatgatagtgacacaactcatgcttgatgatttgaatgaatgtatctacaccaaattcagctaataaatgcggattgaaatctaaatgatgatcgcttaagtgataacgtccaccggtggtctttagccgcccattgaaatacgcctcatgttgaaatggtttgccaaacgattctagagaaactttttcaacgagctgctgcaattctttggtggtcattttccgtgtgttggatcaaccattgtcaggctgattcggcctttcgtggtatcgacttgttcaatccagacagtaacgatatctccgacagcgacaacgtctttcggatgcttgacaaaatttcggcttaattttgataaatgaaccaaaccatcttgtttgacaccaatatcaacaaacgcaccaaagtcaatcacattccggacagttcccatcaattccattcctggtttaaggtcttccatgctcaggacatctttacgcaataatggtgccggcatctcatctcgcatatctcttccaggttgcatcagtgatttcaagatatctgtgatcgtttcttttccgatcgctagttgtttagaaagatcagcaacatttaactgtgcgagtcgttctttggcttctgctgattgggctcctagttgagttagtttaactccagcaacttctaaaatttctttggctgcagtataactttccggatggattccagtgttgtctaaaatattcttcccaccagggatccgcaaaaatccaatcgcttgttcataagctttaggtcctaaacgaggcaccttttttaattggcttctttgcgtgaagctaccgttttcttctctgtaagcaacaatattttgtgcagtcgttttattcaatcctgagacatgctgcagcagttgaggactagcagtattgacatcgacccctacttggttgacggcagtttcgaccacaaaatcaagttggtcactcaatcgtttttgtgaaacatcgtgctggtattgaccaacccctacagattgaggatcgattttgaccagttcagctaaaggatcttggagtcggcgcccgatactaatggcgctgcgttcttccacttgcagatccggaaattcttgacgggcgattgggctggcggaatacacggatgcacccgcttcattcacaatcacataaaatacttcatgatcgatttgtttcaattgttcggcaacgaattgttctgattcacgacttgccgtcccattcccaatagcgatcatttggacaccgtatcgattgatcaaacgttgcagtgctggaccagctgcttggcgtttattcatcggtgccggtttatgagggtaaataacttcgatggctaatactttcccagtttcatcaatcacagctaatttacaacctgttcggtaagccgggtcaaaccctaagacgatttttccttttaaaggtggctgcagcaaaagatttcgcaagttttcaccgaagatggcaattgcttgttcatctgctttctctgttaattcattgcggatttcccgctcaatcgatggtgcaatgaatcgtttataagcatcaagataagcctcacgaacaaatggagttgctggtgaattggcgtgcttaatgagttgccgttcaaaataatcagtgatttttgactcatcgacgactaaggcaacctttaaaacatcttctttttcaccgcgattcgttgccaaaatacgatgagaaaccattttattgatggggtgctgaaaatcgtaatacatttcataaacacctttctcatccttttcagcatcgcgaagtgtactcgtgtaacttcccttatttgcaaaataacttctgatccaagaacgataggtcggctcatctccaatggtttcagcaatgatctcgtgggcaccttgtaacgcagattcagggtcagggatggcttcattggtaaattctgccgcttttgcatagacatctcctgttgttggaaatgccgctatccagtcagctaacggctgcaagccattttcttttgcaatagttgctttcgtacgccgtttttgtttgtaaggacgataaagatcttcgacctgctgcatttttgttgcttgctgaatcgattgcgccaattcactagtcaattttccttgttcgtcgatcaaccgagcaacttcttgcttgcgtttttccaaattctccagatattgatagcgctcttcaatttcacgaatttgtacctcatctaaaccgctagtcatttctttgcggtagcgagcgataaacggaacggtgtttccttcatggagcagttccagtactttcgtgatttgtcgttgattgtaagatgtggtttcctgcattagtaagtgcaacacatcatgatttaattctgccatattcgttcacctttcaatttaactgctctaagtttaacataaaaagtttaacataaaaaagacacctcagaaaagagacgtaagtaacaggctaaaaacagaacatacagaacatgaggtgcgaaattaaagctcaaggtataaaccagcaaaaaacacttccgctgaatcatcagcaggaagtgtcatctacattcaaaatctttcttcaacgtcctcgaaagccttagttattaccaagcatggatgtttcctttttactatgcggatccatcttaactaatctgtttggaaatagtttgtataccctatctttttccaaggacctttagacccaatagtcataatgacacatagattcctctatgattagaaaagttttttaaaagtctggatgccaagggccggttaaattttgatattcaatatcttgtacaatgccgtcttcatcaaaaatcacgccgtgaacggaaccaccaaaaacagcccctccatcaatgccaatcttattatcatgaaaccataaatccgttgtttccatgtcaccatgaagcatgggtgtgatggtatgtccaaagacgattgtttttcccgtatgattttctccagtatgaaatggctctcggatccagataaaatcgtggtcagaagtatcctgccaatgcttcttggtcaaatcaacaccagcatgaacaaaaagatatttttgccattcataagaaagcggccttgccatcaaaaacgccactaagtcacggtagcgactccggatcattaatgcaatctcagttggcgagtactcttctgttgctcccggatgtaaaagactttccatcgtctccttgcctccattgcggacataagcggaataccagtcttctggtgcgttcaaaaattgcagaaaatattcttcatggttcccgcgcaaataaatcgctcctgtctcttccaccaattgtttacccaacaagagacactctttacttcgtggccctcgatcattcaagtccccaatcagaacaagctgatgcagtgatggatcgtaatccaataaaagttttttaaaaagatcatacatcccgtggatatcactaatgacgtaaatgagttttttcatttgggttcatccccttctttaaattattataaaaaagccagcgaaactttacaactgttagccctttccttataataaaaccaactaaaggagcgagaagatgaattggctgcatcaacaatggatccattttaaaaaagacatgcgagaagcttttgatacaggggctatcgctgcacatggtaagaaatagtttgaattttgattgttaattgattgaatcaaaaaaagagaattctccagttaagtactgggaattctctttttttattttccagaaacagcaaagtaattaccatctggatctgcaaaattaaagaccattcgttcttccatctggatcaggtcgccaacttctacatttgtatctagtaatttcttgtaaagcgttgtgatatcttccgaaaaaaacatgatcgatggtgagttcaatgctacttcaggagaatgggcttcaataaagcctttatcataaagcacaaaacgagcatctgattcgctgcttggtgctatttcaacgatagaagtcccatctgccgtttgctcatcaatgatttcaaatcccaatgattgccaaaacgcaacggatttgggcacgtcctctacatataatatgatctgcatttgattcgcaaacatatctctcactcctctgttgttgatgattctgatgtttctgaggcttcatttgacgtattgaaattcaattgcagacctggtttgtcggtaatgatttctgttacttcataggttaagcgtttgataatatcaaacagcggctccactaagcggtctgtctccgctttgcttaagtcttcacctgaacggacttgccggttcaagatgtgattgacctgccctacccgaccggacagcacatattcaggaaaaacgagttgaaattccaagcgggcgccaataatactattttgtttcatatactcttcatcttgtaccttcaacgaggcaaagccaacattcaatttggtttccatttctttgtctttaggcttcatatcgaaatgataagcttcgacgattggttgttgtcgtttgatttccacagtcttcacactccttgattaaaagtatagcataccgatgacatccagcctaccttcattaaaaaaatccagacaaaaagaagcaagatctcttccatgctagaaaacttgttccgtcgttacaattggatcgttaggatacaatcttgacttgataaattgtttttctatctgatggttcttgcttcctgatggattcttgcttctatttcgttaagtaaaattttttatttaagcgttttgagataatctagtgcgtcttgcacatttgagactggtacgatcttcatgtcagtccctagtttcttcgcagctgctaaagcttcttgataatttgttttgatcgaaggatcaacttctttttcttccttcgtgatttcatcctctggtgcaaaaaagatttctacaccactttcacttgcgcttgctacttttttatcgataccaccaatgcggccaacggttccgtcactggaaatcgttccagtaccggcaatattatgccctttacgcaggttttgctgcgtcaattgttcgtaaatttctaatgtgaacatcaagcctgctgatggcccaccgatatttcctgcatcaataacaatatcttgatctgaacttatttccgtatggtcaactaacgaaatgccgatgccggcttttttattcgatggcaattcaatcagcgatccggttgcttctttttctacatcatcttggagatacgtcacttggatcttatcaccgactttttgactttgaacataatcaataaaatcttgactgttgtcaaaccgttttccattgacagctactactgtatcaccaacagaaatttttcctttgaagctagagttggactctacacccataacataaacacctttatagttcattgtgtagggaatatctgctagcttcagtgcttgctcaatggcactattttgagaggattccatgtagtaacgttggatccgattgtactcttcatccgttgcaccgccaaaaagttcttcttcagaaaccaagtcttgaaattgattaaatttactgccaattgccgtaaaaacggttgcctgccgaataccgacactggtcaatgaaaacgagccatcgttttgatctttttggtcattgactgtaattagttctttcaaattgatcgttgccccaggctgttcaatataataagggattggtaaaaaggcacaggcggcaactactaatgctgcaacaagtaataaggtatatttaacggttgatttaagattcatgagcatcacgcttctttacgattgcttggtaaatatttggtggtaaataggcttccacatcgccaccgaaatgcaagatttcttttagcaaacttgaactaatataactgtatttggcatttgccaataaaaagactgtttcgagcgtcggatctaagtggtgattcatttccatgatatctcgttcgtactcataatccttgacactccgaattcctcgcagtaaaaattgggcacccatttttttggcagccgtaacggtcaattccgtctcttgcgcaacaacgcgaacattcgggacatgcgctagtgcctcagtgatcaattccactttttcgccaccggtaaagaagttgactttactagtattcacaaagacaccaatgatcaattcatcaaaaagggaagctccccgttcgatcagatctacgtgaccagcagtcaatgggtcgaaactgcccggaaataatgctattctcttcatcttatccctcatttctataaatcgtgactgccgtaatcccataaacctgccgtctactttgggccaatgtgccaatcctctctggcaaatccacttcttttgctgtttcgcaaacaatgaccgcatgagttgccataagatccgcttgtaccatttgttccagctgcaaaaccagctcttgcttcgcataaggaggatccaaaaaaatatagtcgaactgctgttgagtgcccacaaattcttttagggcttgtttggcatccatttttaaaacagtaaacttttcgggctcctttgtgatgccaatattttctcgaataatcttaatcgctggataactgcgatcgacacagatggcatgtgcggcgccgcgagaaacagcttcaatagctaatccgccactgcccgcaaataaatccaataccaagccgccatctaaataaggaccaatcatattaaaaatcgattctttcactttatcggtggttggtcgggtattatccccgcttaagctcttcaattttcttcctcgataatctcctgcaacaacacgcatatgcgttcctccaaaggttccataatttcttaaaaaagtattccagtgaccgtcatctttttgagcaacaaaaatgggtgcgattggcacccaaacttttgttatacattttctgccagtcgaatcgtcgtatttttttcttccacatcaaatccatcatcactcacttgatatgctgcgtcagtgccgattttttccgcaaaattcatctcaacatctggtcgatatgaaggttccacttgccgtacgaaatgaaattgttcgattttattttttttcatttcatagtcttcttcattcaagtacatgaccacatatttcattttgcgtgacacataatggacaaatccgaatctgcgtaaattttttaattggcgtaaactatagacccatacgatcagtccccgtcgtttttggatctcaaacgtttctttcgtctcctcttgcatgacaacttcctccacatgttgattttgattgaaaaaaaggacttccagcgtccactttgacttcctctgagaaacaatcagcaatcgacactgtgatctcatcaagcaagacttgcagctggttttcactgtgtcgaaattctccgacttgaggattcaaatcaagtgcccttttggctttgcgtaatgcccgctgctgttctttatacccgggagcaaacgtgccataagcagctattttttcaaaatcggtctttttatgtacaaatgaatcaattaatcccaatacttcttggtcttggtacatcgccttcttgttgtaacaataagagcgaaacaactgactattcttgatactggaaattaattgttcaatttggtcttcaattgcatataaatggtcattataaatcatctgatgtgctatcctctgtgtgttcattctcatcttcttggattaagactaccatatttgctttagaaaaagcaattcctatcttctcaggggtttgattcgataaaacattgtaaaccgaaggatcactataccatgataaaatcgtaaatgtcggatcgtagacaggtgcttcaaagatggaagaaacggttgaaatttccttttcctttaaaatatcctgccattcttcttgggtcagagtgaaggtgctggttcgttctgctgtcaatgctttttgataggcatgaatccgttgagatgttaagtgatccgaaagattctccgtgatttcttgaaggagatctttggcttcactatgagtatctaaagccatcccaaaactttccagctctttttgatcacgcattttttggatgatcacaaaagctaacgtttctttttcaagagcagctgtttcttggttcactgtttgagactcttgaaacagcggcagctccccttctgttaattgataaggagacagcttcaataatgtcgtttgatccagataagtgactgctgctaattccgatgtcttttgatcaaaaaacaaaaccgcgaaagtgccattgtcaaacgccactaagggacgatagttcatatcttgttccataagttcaaaactcactgaacgatcattttgactcaatgtaaaattcggatagatcatcgtaagctctgtaagatctgtcattgtcatcccaatcgaaaatggggctaaggatgcgccgccttggccaatcactttgattgcctgaacactttcgccgtcggtgttgatttcgagatattgttgatcatctaggtgattgtatacgcgaacttcaaagtcatatcctgtgcgatacgtgcgtatcggcgagccaaaatcttcttcaaaatcagaaagaggttcaccgatcgcttttgctaagccatctgctttgattggttcataattcaaattggtaggcgcttttacaggattatcaaaaagaggtcttgaaggagaaacccgctgaaaaaatactggctgcagatagacgacgaccagcgccaaaataaacaagcagcaaaataaaattcctctacgtttcatcttcaagacctacttcctacttctctttgatttcgatcagcaaatcacctgatgtgatggcttctccttctgcaacatagacgtgttctaccacacctgagaaacgagcttcgatcgctgtttccatcttcatcgcttcagttactagaacggtttgtcctttcgctacccgatccccttttttgactaatacttgtagaacagaacctgacatcgttgcaccaatttgttctttatttgttggctcagctttgcgttttgtttgaacggagctgatgatcgaatgatctttgactaagatctcccgacgttgtccattcaagttaaagaacaacgtgcggttgccttcaatatctggttcgccgatttcatccaagcggatgatcaagattttccctttttcaagttcaacattgatcgtttcacctaatcgcatcccattaaagaatgttggtgtatctaggaccttgacgtcggcaaactgttcatatgcttttcggtagtctaaaaagacttgcggatacatcaaatagctcaatacttcttctgttttaggctggtagccgatcttttctgctaattcggctttgactttttcaaaatctactggttcagcaaacgcaccaggacgttctgtgaatgctggccgacctttcagaatgatccgttgtaattcttttggaaaaccgccgactggttgacctagttcaccttggaagaaagtaacgactgattctggaaaacttaaggtttcacctttatcataaatgtcttgttcagataacccgttttgtaccatgaaaagagccatatcgccaaccacttttgatgatggcgtgactttgacgatatcaccgaacatcatattgacttcatgataaacttctttgatttcgtcccatttttccccaagtcccactgcttttgcttgttgttgcaggttcgaatattgaccaccaggcatctcgtgtttatacacttctgtctgaggagcattcaacccattctcgaaaggatggtaatacatacgcacatcttcccagtaatgattcaactgctggatattatcgacattaatttctggacaacgttcgccgttgactaacgcatagtaaaggctactcatacttggctggctagttgctccactgactgcagacatagcaacatcgacaatatcgacacccgctttggttgcggcagagtaagtgatgatgccattgccactcgtgtcgtgggtgtgcagatgaattggtacatcaatactcgctttcagttcactgatcaagcgatacgccgcttgtggtttcagcaatcctgccatatccttgatcgcaatgatatgtgcaccaagattttgcaactccttggccatatccttataataatcgatcgagtatttttgacgagtcggatcattgatatctccggtataacagatcgctgcttctgcaattttgcctgcgtcccttactgcttggatgcttttttccatttgcggaacccagttcaagctatcaaaaattcggaagacatcgattccttgcgcagcagattctttgataaattcttctaacacattatctggataatttgaatatcccaccgcatttgatcctcgaaacagcatttgtaacaatgtgttcggcattttcttacgaaacatacgcagccgttcccatggatcttctgtcaagaaacggtaagcaacatcaaacgttgctccgccccacatttcactggagaatagttgaggaatcccctcttctgtcaacgcagcgatcttcttgaagtcctgggtacgaactcgtgtagccagcaagctttgatgcgcatcacggaaagtcgtatccgttagtaaaacatttttttgctgattgatccaacgaatgacgccatcagcaccttgagtatctaaaatggttttagccgatacgaaatcaggcaatgtctcaatctgttgcggaattcttggatcattataaaatggttttttttgtttctcgattcccggaaagccattgatcgtaatctcaccgatatatttcattgttttatttccgcggtcgcgaatgcgaggaaactcaaacaattcaggagtattatcaataaatgtcgttttcgcttcgccagaacgaaattgcggatgagaaacaacattgcgcataaagagaatattggttttgactccacgaacccgaaattctttcaagcagcgcatcattttttgaatcgcttgatcaaatgtcgctgcatgggtacaaacttttaccagcaatgaatcaaaatagggagttacaacggcgccagcataggcattaccaacatctagccgaacgccaaaaccaccaggtgaacgataagtatcgatttttccagtatcaggcataaagttattggcaggatcttctgtcgttacacgacactggatcgcaaccccttcaaagtggatatccttttgttgcgggattccgatttctttgtgcaagtctttcccttgagcaatcaaaatttgtgtcgttacaatgtccaagttagtgatcatttcagtaatggtatgctctacttgaacccgaggattcacttcgataaagtaaaagttgtctccttctaccaaaaactctacggttcccgcattgatatacccgacatgtttcatcaactgtaccgcagcttgacaaattttttctcgttgggcagcattcattgatacacatggagcgacttccaccactttttggtgtcgacgttggacagaacaatctctttcaaatagatggacaacattgccatgactgtcccctaatatttgcacttcgatatgttttggattactgatgtatttctctacatagacttcatcactaccaaatgccgctttcgcttcgcttttcgctcgttcgtaaccttcacgggcttctttctcatcgtgagcgacccgcatgccgcggccaccaccgcctaaggctgctttgatcatgattggataaccatgggtttcagcaaacagcaaaacgtcatcaatagtgttgacgggtccgtcggaacctggaatggattggataccagcctcgattgcagctgttttggctttgattttatcgccaaagatatccagatggtgtgtcgaaggtccaataaaaatcaagccttcttcttcacagcgttgcgcaaacgctaaattctcggataaaaatccgtaaccgggatgaatcgcttcggcaccggcctttttcgcggtgcgaataatatcttctatgtccagataggcttcaatggggcgcttgccttttccgacaagatacgcttcatccgctttaaaacgatggactgaatattcatcttctgcagcgtagatacccactgttttgatgcccaactctgcacacgcacggaaaactcgaatcgcgatttctccacgattagcgactaatacttttttcatcataccactccattccattgatcaataattcaaactatattgtttcctcttttcttctgcactaatgttcaaaataaagccgatacaaatcgacaacattaacaaacttgatcctccttgactcaaaaaaggaaaagtgatccccgttaacggaatcaagccggtgatcccacctaaattgataaagatctgtgacataaataatgtcccgatcccaatacacatcatggaattaaaggaatctcttgatcgaatgccaatcaaaaacattcttcctaccatataaaagagaatccctaacaaaacgattgagggaatcaagccaagttcttccatcacgattgaaaaaatataatcggtatgggcttcattcaagaagcctcgtttttgaatactatttcctaatccgcgaccaaataatccgccattgaacatggcataatatccattgaccatttgatgtcctgtatcaaattcatcggcaaaaggattggtgaaagcggcaaatcgattgtagatatattcaggcagaaatttcccacctgtcaaattgacaaaagtaatcgccaaaaaactaaagagaactgtggccccacctaatatcagggtatacacatagtttaatccgctagccagcaaaaccacaaaagccagcatgaaaataataacagcgttcccgaaatcgggatagaaggccaaaatcaccgtataagccaatacgatcgccattggtcttctcacagaaccccagaagtcttgctggatgccctcttggcgataagagaatgtgaccgacaagaaccaaatgataataaactttaagtactccgctggctgaacagagaatcctgcaatcgagagccagccccatgcaccattccttttttggaagaaaaaggcggcgatcaaaagaaagaaaataacgatcatggcaatttggacaaacttcttattgcgaaagacatcagttttcatcttgtacatgatcgtgatcataatcaaacttaccacccaaaaaacggcttgattgatcacataagctgctgaagtagtcggtggctttgctgtcattgcgacatatgaggtcgaactgtaaaccatcatcaaaccagttacgcataaaataaggtaaggtattaaaatgctatagtctaaaaggtgtctttttttaactttttctggcaagattatgcctccttgccgatttcagtagatttttgttcttcatatacttcgctatacaattgatttaggtctttttccagatctgccatcaattgttggccagcagcattgtctacaatacccaagcgtgttgcgaaagcgacttgtcgtgataagccatacatttgtgtgtcaacgacttcctcgaatgctttacactgagcaatacacaaactattttcttgattgcgaatcaatcgtttgattcgttcggcatcctctaaaagcagattcaatgccatttctgaatcaatctgcgccattctggtccccccatttcttagtttcattattatagcatattctataccgatttggcacagtaggatgccataaattcaaccgtaaataacgaacataaatttttttttgctaacaaaaaaagcgaattatcgactgatataaaaaaaagaagtattttcattcgtttttttctgtttcattgggttccgctttgctttgtaaatcgtgaaacacgaaccaattgtgaaacattcaaagcgattcacttaataaggaaaaagacaaaagattgatccagcagcctttattgaaaaaaaagaagtggaattgtccacatgttctttcttcctttcaaaaaaagaacaggaagcgcaccgcttcatgttcttttgattactactgtttctgcttttcaccgataaagccatcaccgttaatgtcctcatctgataaccgttcgacttctttgatgaatccctgactaagttcttcgtaagattctccaacaactgcgtcatctggaatttgatctaggttagcaaaaaattcaatatgattatgcaagttggtaaagatcatcggggcatcgccgccgtattcaccatctaaattgatcatcaaacgatcttttgcatctggcgcatcgacttctaaacgagacgtttttgtatagatcaagcgtcggtcattgatatgtttgccaccgttcatcatcaatgcaatcagatgaacgatctcaaaaatatttgccgttttcactatgatcagcgaaaatttcccatcgtcaagtttcgcatccggggcgatttgttcaaaacctcccactgaattcgtcaatcctaggaagaacatcgaagcgccgccaatatattctccatcgtcatatttaaagtgcatcttgattggtttgactcgcggcaacaattctgcgccttttgcaagatatgccaaataaccgaacacactcttcaactctgaaggaacatcataggtcaactcagtcaggtgtccacctgcagcgatattgataaaataatcccgatcagtttttccaatatccattttgatcgtttgttccttgagaatgacttctgcagcagccttcacatcgtttctaggaatcttcaatgcacgagcataatcattggttgttccgcctgggatgatcgccattttggggcgcttttttagcggagcgataccattaactacctcattaatggttccgtcgcctccggctgcaacaaccagatcaaatccggctctccctgccctactcgcttcatcgcgagcagagaatgggagagcagtcgtcgcaaaagcactggcttcataaccggctttctctaagacttctaatatatcggcaagatgtttacgaatcagttcttttcctgatgttggattataaatgactctggctcttttcatattccgcctcttatcgttttgctaattcttcttgaagtaatttgttcacaacgccagggttcgcttgtcctttagttgctttcatgatttgaccaactaagaacccaactgcccggtcttttccgttcttgaagtcatcaacagattgttgattcttatccaagacttcattgatcattggcagaagttgtgctggatcggatagttggatcaatcctttcgctttgacaacttctttggcatcgccgccattggtgatcaattctttaaagacttttttcgcaatcttagaactgatcgttccatcagcaatcagttggatcattcctgcaagattatccggcgttaatttggtttcttctaattccaatttttcactgttcaagtaggccgaaacttcacccatcaaccagtttgatgcttgttttggttccgccccagcatcgatggttgcttcaaagaagtcggacatttctttggtcagtgtcaagaccattgcgtcgtattctggcaatccaagttcgttgatgtaccgttggcggcgtttttgtggaagttctggcaatgtttgccgtactcgttcgatccattcgtcatcaataacaaatttaggaatatctggttctgggaaataacggtaatcagatgatccttctttgacccgcatcaagattgtcttattagtggtttcatcaaaacgacgtgtttcttgttggatctcaccgccagaaagcaatacttttgcttggcgtttttcttcgaaagccaagccttttttgacaaaggacatagagtttaggtttttcaattcggttttggtaccaaaagcttcttgaccataaggacgtaaagagatattggcatcacaacgcatggatccttcttccatcttcacatcagatacttctgtaaattggatgatagagcgcaaagcttccaaataagcataggcttcttctggcgagcgcatatctgcttcagaaacgatctcgatcaacggcgtgccctgacgatttaaatccacataggaatagccgccgatgccatgcatatttttccctgcatcttcttcaagatgaacccgctcaatacggatttttttctttttgcctgctacttcgatctcgatccaaccatcatgaccgattggttggtcaaattgagaaatttgataggctttcggattatccggatagaaatagtttttgcggtcgaaatgagtatctttggaaatttcacagtttaacgctagtgctgctttcatcccaaattctaacgcggctttattcatcaccggtaatacccctggataaccccagtcaatcacattcgtattgctatttggctcggcaccaaaatgtgctggcgccggtgaaaagatttttgagtttgtttttaattctacgtggacttcaagcccaatgactgtttcgaagttcatgcgttattccctcctaaaatcactggttttttcgtatgaaaatcagttgcttgttcaaacgcataagccgcttgatacatcgttgcttcatcaaaatgtttaccaatgatttgcaaaccgactggtaatccttcagaaaatcctgctggtacagacatacctggcaatccagccaaattgactggaatcgttaagatatcattcatgtacattgtgattggatcattgatattttcacctagaccaaaagcaacggttggagatgcaggaccaataatcaaatcgtaatcagcaaatactttgtcaaaatcttgtttgatcaatgtacggacttgtccagcctttttgaagtaagcatcataatatccagcacttaatgagaatgtccctaacatgatccggcgttttacttcttctccgaatccttcactacgagaattgacatacacatcgtctagattttttacgttttctgaacggtagccataacggattccgtcaaaacgttgcaagttagagcttgcttcagaagaggcaataatataataaacggaaacgccatatttagaatgaggcaagctgacttcttcgactgttgctcctaatgctcggaatgtttctgccgctttcaacacagcttcacggacaccaggttgaatcccctcacccatatattcttttggcagcgcaactttcatacctttgatatcgccagttaaccctgcagcaaaatctggtactgctactccagcagaagtgctgtctttggcgtcaaatccactaatggcagacaatgccagtgcattatcttttactgaacgagtcattggtccgatttgatccaatgaagaagcaaacgcaatcagaccaaaacgtgaaacacgaccatatgttggtttcattcctacgattccattgaaagaagcaggctgccggatcgaaccacctgtgtcactccctaatgagactggtacttgcccagcagctactgcagctgcagaaccaccagaagaaccgccaggaactttggtatgatcccacgcattctttgtttttttgaagtaggaagtttccgtacttgctcccatggcaaattcatccatgttcaatttaccgactggtatcatgtctgcttggtagactttttccatcacagttgcatcatatattggttcaaagttagccaagatcttagatgcagctgtagtcagtaggtctttggtcacgatattgtctttgatcccaatcggaatccctgccaaaacattgctttcagaaatacccttctcatcaattgctttggctaatgccatcgcgtttgactcgttcaatgtaataaaagaatccacttttggttcagtcgctttgatttgctcgaatgtctctgctgtcaaatcgacagctgaaatttctttggaaacaagcatgccatggagctcttccaaacttttacttactaattctgtcattacgcaccggcctccccattatcaataattgctggtactttaatgaaaccatcttctgattccggcacattacgcatcaattcttgtcggttccagccttctgctgcgatatcttcacgcatcacattgattgtttcagcaacgtttgatgtaaatggcacaccttctgtgtctacttcctctaaggtttctaccatatcaataatttttcctagctgagaggtaaactcatgtaattcatcatctgagaatgataattttgctagcttggcaacgtgtttgacttgttcttcgcttatcgccataaaatcctcctctttctcgcatccataaaaatacgtttacgtttttccaatgtattgtatcacttttccagcaaatcatgaaatacattttgaaaattatcatacttaattgaaaatgtaggtctcgattttttctgccccatctttacgggcaataaaagcttgctgtttccctagagagccaacttggacttcgatctcgccaggaactcctttgaagacagattcgacttgctttgcgctatactgaacaaaactggtgatctcggttttactgtaataattcgactcgactttcaaaacaagtttttggagttgatcatctacgtaatacgcattgccggtcacaccactcaagtcaggaaagaaactaatgacagcatcacgaaatgttttgaacttattatccaaaccatcatcggtggcagcattggtgacccccgcagctacaggtaaaataatgtgggcctctgctactttctcatactgatcgatagttgttcctccatcttggctgactgcttgataaacataattgcctccggcgatatcatctttagcagcttgttcgaataaaccgatcacgataggtacagtctccaaccctttgatttttcttacttgtgtcaaaacagcattgactgtcttccgcgcgtttgccatccactcatcacgagagatagaaatggtctcgtcgctgccatagtagacggtattaaaggcaaagcctaaactaatacctgccaatgttttgccgtcttctttaataaaatcttgctccatcaattgttgaaaaataagcggctgatctgaaccggcagggttaagaccttgcgggttatcatcagagacacgtttcagccaattcttgatcgtatcagcaggaattttttgaccttcttgaaagtagcacgtatcgacagaaaaagtctgcttggacagcctcagcaagccattctcaaaattggtttgattgaacccgctgttcatttgctctgcattcaatcctctagcagcactcagttggtacttgccgtctgtcatgactgcctgatagacagaattatcgacacggccagtggtaatattaccgctggccgtctcttcaccttcgttgatattcgtgattcctttgttgagattgccgcaacctgacaaaaagcttaacgacatcgcgacgatcaagaagtgtttaatcttcatggttatggcccccttcaatcgctgccaccatttgattctcttcccaaactgtaatgcccaagctttgcgctttcgtcaatttactaccagcctcttctcccgctacgacgatatctgttttctttgagacacttcccgtcacttttccgccaaggttctcaattctttcctttgcttcttcccgagtgaagtgagtcaactttcctgttaagacaactgtcttacctttaaagggtgagtcaatagccgagagctcctcattttttaaaccaaggtaatcaaaattgacccctgctttctccaactcatctaaaagatcatggacttcttcgttgttgaaataagtgacaacactatccgcgatggtttgcccaatcgtttctaaagaaacgatctccgactcatccgctttgcttagattacgcagattgcgataatgttccgcaagaattcttgctgctttagatccgacatggcgaatccctaagccaaatatcaaacgctcaacagaattttctttactggcttcgattgctgacaaaatattgtttgccgatttttctttgattttgtctaatgtcaacaattgttcttccgtcaaataatataggtctgcaacatcagcaactaagtgcttttcatacatttgttcaagaactcgtgggcctaacccttcaatgttcatagcatttcgggaaacaaaatgactcaatccttctttcatttgtgcaggacacttcggattgatgcagcgcagtgccacctcttcatctaaatggaccaattcactgtcgcaaatgggacaatgggtaggaatcggatagggctcactggcttttgaccgcttatccgtcaatacgttggcaacttctggaatgatgtctcctgctttatagataatcacagagtcattcaagcgaatatctttggcgcgaatataatcgacattatgcaggctggcacgacttactgttgtaccagctactcgaaccggcgtcatgaccgctgttggtgtcacaacacctgtgcgtccaactgtccattcaatctcttcaatggtcgtttctgcttcttcgggtggaaatttataagctgccgcccaccgaggagctttaaccgtaaatcctagtgtatcttgatcggagaagtcattgactttgatgacaacgccatcgatttcataaggcagctcactgcgtttttcgtgaaattcttcgatatacgcccaaacttcatcgatcgttcggcacaaacgccgttcatgatttgtccggaaacccaaactgtctaattcatcaagcgctgagaattgatcgtgtgcctcgataggaccgaaatctgccagagtatataagaatgtgctcaaattacggctggcagcaatccgtgtatccagttgccgcaagcttcctgctgcggcatttcgaggattggcaaatacctctaagccctcttcttcccgtacttgattcaaacggatgaaagaagctttaggcatgtaacattcgcctcggacttctaatgaaacaggttctttcaattttaatggaattgacttgactgtcttcaagttttccgtaatattctcgccgactgttccgtcaccccgtgttgcaccacgcacaaaccgtccattctcatatttcaaagagattgatagcccatcgatcttcaattcacagacataatcaacggcacgacctagcgctttttggactcgcgcatcaaaagcgatgatttcttctttatcaaacacatcattcaaactgtacagaggaatatcatggatgaccttttcaaatccaggcagaacgattccacccactcgctgagtaggagaatcttctgtgaccagctgcgggtaatccgtttctaattgaacaagttctttataaagtcgatcatagacgtaatcttcgacagacggctgatccttcacataatactcataggcatattgattcaaagtggttcttaattcttccgctcgttgttgaacttcagttgatggcacagccatttcgattcctccttatagtttttcgatcggagcaaatgctgcaagcagccgttttactccttgttggggaaaagcgacatctaattctagatcctgggcggcccctgtggtccgaacgatcgtgccgacaccccattttttatggttgactttttcccccacttgccattgattgccggctgcagtcgtggtttgtctcgacgaaacagtggactgacgaggttgggtatacgttggtttgaaaactttaggctgaaaggaagcagctgcccctttcggctgagttctttctcccagtgactgcagaagatcttgttcaatctcttccacaaaccgagaaggacgattgtattgagtgcgtccatacaatgtacgagaaaatgcgtttgtcaagaatagctcttcttctgcacgagtaatccccacataagccaaacgacgttcttcttccagttcgctttcttccatcaatgctcgagataacgggaagatgttctcttctagcccaatcaaaaagaccacaggaaattccaatccttttgccgcatgcaatgtcattaatgtcacttgactgctttcttcttcataggaatcaacatcggaaagtaaagcgaggtcattgaggaagacagtcaatttttcttctggcgcatcggcatcatcttcattttgtgcctcaaagcgtttgtcaaattcttgggtcactgttaagaactcttccaagttctccagccgggattgtgattccagattgttctgattgatcaaatcttgtttgtaacctgttttatccaaaatttctttcgtcagttctgtcactgacagataaggaatcatttgggcaaactggtccatcatcatgccgaagctaccaagttctttgccggccttgcctgagatattggctaaatcgacattcatcgcagcttctaacaaggaccattcatgaagcgaagcaaactcacgaagtttttcgacagaagtcgccccgataccacgtttaggcacattgatgatccgttctaggcttagagaatcgcttgggttagcaatggccgaaagataagccaagatatcacggatttctttccgatcatagaatttgcgtccgcccaccattgtataaggcacgtttgcttttaatagcatttcttcaatcacccgggattgagcattggtccgatacaaaacagcaaagtcgccgaatttacgtcctttatctgcaatttgtttttgcatctcactgacaataaaacgagcttcatctcgttcactatccccgcgatagtaagtgattttttcaccggctctattttcagtccacaaatttttgtctggacggttgcggttgtttttgatgacttgattcgcagcattcaaaatcgtctgagttgagcggtaattttgttccaacaaaatcactgctgcatccggataatctttttcgaagtccaaaatattttgcatattggcaccccgccagccatagatactttgatccgcatctcccacgacacaaagatttttgaagcggtccgctaataaattaacaagcgtatattgggcatgattcgtatcttggtattcatccacatggatatagtgaaattttcgttgataaaactgcagtgcatcttcattttccttaaacaagcgaatggtattcatgatcagatcatcaaaatccatacattgattatttcgtaattccttttgatacagcgcataacagcggcctacgatctgttcaaacaagctcccttgttgattttcataatctgccggagtcaacaattcatttttggcattggagatcgctcctaaaatggaacgcgggtcatatttttttggatcaatatttaactcttttaagactcgtttcatcaaagtgttttgttcagaggtatcaatgatcgtaaagtttctagagtagccgatctgatcaacatctcttcgtaaaatccggacacacatcgagtgaaacgtagagacccaaacatcttctcccccagatccaagaagctgattcacccgttctttcatttctctagccgccttattcgtaaaagtaatggctagaatattccaaggattgacatttttttcttcaatcaaataagcaatccgatgggttaagacccgcgttttgccactaccggctccggccattaacaacagaggtccttctgtatgcatcacggcctctttttgccggggattcatattcgcaagtaattcgtttttggatgacatggttttaaccatcctttctttctcaatccattcaattatagcattatccgattgtagggaaaaccgaacgccttgaaaagttgctaaatttttcttttttgtccttcaaaaaaattccttgttatctattcaaaaaagggctaaattaaataaggaaagtgaggagtttgatgaagaaacatgaaatccattatttagatacaacccgcctggcctttataggcaaaggaatcttggtaggagcatttgtggggatcgtggttagtttgtttcgccttgcgattgaatggataggcgaaaaagttgctgctgtctatcgacaccttgctgatcatccagatcagatcatactgtgggtaattctctctatcatcactgcaattattgtgatccttttagtaaaatcagaacctcaaatcaaaggcagcggtattcctcaagttgaagggaagttaagtggcgagatcgattataattggttctctgtcctttggaaaaagtttatcgggggcattttatccgtcggatcgggtctttttttggggcgggaaggtccttcgattcaactaggtgctgctgtcggacaaggtttaagtcagttcttcgaagccccaaagtcagaagaaaaaatattgatttccagtggtgccagtgcaggattgtcggcggctttcaatgcaccgattgccggtttgctgttcattttagaagagatccatcattccttttcacctcttgtatggctgacatcttttgcttcagtgatttctgctaactttgtctctttaaatttttttggattgaaacctgtcctttaccaaggaaagatcaatgacttgcctttgaaatattacggtgctttagtcatcttaggtatcttactagggatcttaggacgattttaccagtggacattgctgtctttgcctaaatggtatggaaaactacccatatcctctgactggtatggattgattccttttgtgctgattattccaatcggtctatttttaccagactatttaggcggcgggaatcaaattatcttgactttaggagaaaccggggctcccctgttgtttttggtcatgttgctgattttgcgttactgtttttccatgatttcatatggagctggactgcctggggggattttccttcctatcttaacattaggtgcgctgattggtgcgatctttggtacctttttggcacagtcgatcggtctggatcctatttatatcaagaatttcgtgatcgtagcaatggctggttattttacagcgatcggtaaggctcctttaactgctattattttagtaacagagatggttggatcaatcaatcacctaatgccgttaggactagttagtttagtagcttatatcgtggtcgatggtcttggtggtcatcctatttatgagtctctccttgaaaagatgcataaagaacccgctgtgaatatccgaggaacgaaaacagtgatcgagtatccggtaaccgcagaaagttcatttgatgggatggccgttcgagactttccttggccagaaaacatgttgctgatttccattcgtcgtggcgaaaacgaaattttgacccgcggagatacgatcatgaaagttggtgatgcccttttgatcttaacggattcgaatagtgtttcggaagtgaagaaaaaaatcagctatttagctgatggtcctctgacttaaacattggctgccaaattgccgtcaacatcctcctgtctttatttatcgatcagaaaaaaatcgaaggagcaaagctacagacacatgttctgcagttttgctccttctttcattgccatacaatcgctgtcgtataatattaccaaacggttctttctaaaatcagcttctgaaattagctatagtatttttccaccaaacgttcatccacataaacggaaacttgaccgtcattgactgggaaaattcctttacctgtttcgtctaagacaacttttgcttcattatttttcaaaatatctacgtaagtttcaccaccatgaatggcgctgatggtcatttctttctcagcaccttgggcattcgtcatgaccacggccaagccagacagttcgtgctcataatctcctgtcagtacccaaccgatacaatttgggtcatcgaaataatcaacttgattgccaaaggagattttttcacgcaatttcaggagattttctaaattttctccaactggttcaataccttgttcaggaataccgaatagatccccccagaaaacaactggtactccagcttttcgcaacaagatcaacgcataggcatgcactttaaaccagccatctacccatgactgtaaactctgaccgacttgcgtatcatgattatcgacaaaagtcacagcgtagtcttctcgagaagcagtcaatgtacctgcaaagatttgactcatatcgtacgcaccattcgaatgagatgcttcatagaaattgtaatgcagtggcacatcgaacagatggatcagatttccggaagaatcgagatactcttctagtttcggcagatcacccgaccaatattctcccaccacaaataaatctttgcctttttcttcccggcgattcaaaagccaattaacataataattaaactcaatatgtttgacagcatctaggcgatagccatccacattcgttaactcttgataccatttgccccatttatccagctgttcgatagtttctggattctccatatccaaatcacagcccattagataatcatagttgcccatctcatcatccacttgatcttcccaccctttttgggctaagttaaacaaggcatgatcgttggttcggtcatcataatcaacgccagaaaaatttttccacgtccagacatagtcattgtatttcccttttcttccagggaaagtgaacttcgtccaagcttcgatctcttcttcatcacttatcggcttgttgcgattgtcccaactgtatttgaccgctggtgccgtttctttttcatcggctcctatcaaatgattgaatacaatatctgcgtaaacctccaacccctgatcttgcaacgctttgattgcttcaagatattcatctttggttccgtacttggttggtattgatcccttttgatcaaattctccaagatcgtagtagtcgtagacaccatagccaacatcttcgacgcccgctgtacctttatatgcaggaggcaaccataccgctgtaaatccataatctttaagctcactactcatttctttcaatctattccaatgttgactgtctgcaggcaagtcccattcgaagccttgcaatatcacttcattcttcatataattcccccctaaaaataattaagccaaagaatagccattcttgtcaaacattaacccatttcgattcttttctgagtaatttgccgaccgtttttgaccgtttaagaatgtattacccttacattttgattgtttttaaacgattgtgattgattatgactgttttatgtgctatcataacaattgaagaggtgatgtaaatgcttacagaagagcgtcatcaaaggattttagcccttttagaagaaacggatatcgtgaaagtcagcgaattgatccatcaattacaagcatctgagtccactatccgtcgcgatttacaagaacttgaagcacagggagttttggtccgaatccatggaggtgccaaaaagatccagcaccttggatttgaacccaatatgaaagaaaaaacgcaaaagttccaagtagagaaacaaaaaatcgcccaatatgccgtctcattgatcaaaaaggatgaggtcatttacttggatgctggaaccacaactttagaaatgatccctttcttgtcatcgatctcaaatgtgaaggttgtaaccaactctgtcaaacatgcggcattactgatcgatcaaggaatcgagacattgattttaggaggaacgatcaaaatcagtacgaacgctgtcttggggagcggtgccagtgagcaattgcgaaaactgcgcttcaatcgctgttttattggaatgaatggtgctcatgtagacgcaggctttacgactccagatcctgaagaagcaatgatcaaaaaaatcgcgattgaaaatagtcaaaaagcttatgtattactggaccattctaaatttcaacaaactacttttgctcaagttgctgccattgaagacgcagagattatcacagacttctgtccgaaaaactatgcggctaaatttcgaacacaaacgactattatggaggtatccgaatgatttatactgtcacactcaacccatcaattgactatattgtccacgtcgaagcattacaattgggcgaacttaatcgaatgaagcaagactttaaacttcctggcggcaaaggcatcaatgtttctcgtattttacagcggatccagatcccttccactgcacttggatttattggcggattcactggacgtttcattgaagattggctgatcaatgaaagaatcacgaccgatttcacacaagttgctgccgatacaaggatcaatattaaattaaaatctggcgaagaaactgaaatcaacggattagggccaacaatctcaaaggatgaaagtcagcaattgaaagacaaactgtcttctcttaccaaggaagatatcgtcattttttctggtagcaaaccaaatggactgacggctgactactatcaagagttgatcgccatcgtcaaagaagctggagccgagttcgtcattgacacaacgggtccagagttgttcgcagcattacccgaccaaccgttgctgatcaaacccaacaatcatgaattagcggaattgtatcaaacgacattccactccttcgaagatattttaccttatggacaaaaattaatcgctgatggcgccaagaatgtcattgtctcccttggcggagatggagccattttctttactggaaacgaaatctaccgctcgaatgttctgaagcgttcactgaaaaactcggttggagctggcgactcaatgattgctggctttatcggacaatatacagcaacaaaaaatgcactggaagcctttaaatggggagttgcttgcggcagcgccactgctttttcagatgatttagccacatcagcatttattcaagaattattgccagaagttgttattgaaaagatactttgacttaacataaggaggataaacaatgaaaatcaacgatttactcttaaaagatgccatgatcatggaccttcaagcaacggataaaaaaggtgtgattgacgaaatggttgccaaactttatgaagttggccgcatttcagatattgctgtctacaaagaagggatcttggctcgcgaagcccaaacatcaaccggtcttggcgacggtatcgcaatgcctcatgcgaaaaatcaagcagtcaatgaagcgactgttttatttgctaaaagtaaaaccggtgtggattatgaggcactggatggtcaacctacttacctcttcttcatgatcgctgctcctgaaggagctaatgatacccatttacaagccttagctgctctttcccgcttgttgattgatccagaatttgttgagaaattaaagaaagcaccaactgcggatgcagtccaacaactatttgctgaagcagaagtacaaaaagaagaacagacagatgtcataactacagagtcagtgagtgatcgcccttatatcgttgctgttacagcctgtccaacaggtattgctcatacttacatggctgaagatgcattaaagaaaaaagccaaagaactaggcgtagaaatcaaagttgaaacgaatggttcggaaggcattaaaaatcgattaacagaagaggacattgcacgagcagctggcgtcattgtcgctgctgataaaaaggtcgagatggatcgtttcaacggcaaacatctagtgaatcgtcctgttagtgacgggattcgtaagacggaacaactgatcaatgaagctttaagcggtgatgctcctgtctttcacagtagcggacaaacagttgcagaagaatcttctgctgatggtacgtttggtcaacgaatctataaagatttgatgaatggtgtttcccatatgttgccattcgttattgcaggcggaatcatgatcgctatttcctttatggtcgatcaattcatgggtgtaccgcaagacgctttaaatcaattaggtagttataatcaacaagctgcttggttcaatcaaatcggtaatgccgctttcggattcatgttacctgtcttggctggatttattgcatcgagtatcagtgatcgcccaggtttgatcgttggttttgctgctggcgcattggcaaacagtggtggcgcaggattccttggtgcattgattggtggatttttagcaggatatgtcatcaaattcttgcgcaatcttttcaaaggtttacctaagtcattagacggaatcaaaacgattctcttttaccctgtttttggtttgttgattactgggttcctcatgctaatgatcaatgtcccaatgaaagcgatcaatgacggcttaaacagcttcttaacaggattgagtggaacaaatgccgctttactaggtgctctgttagcagctatgatggcagccgatctaggtggtccaatcaacaaagctgcctatgtgttcggtacagcaacacttgccacaacggttgccgaaggtggtagtgtcgtaatggcctcagtcatggctggtggaatggtgccgccattggcgatctttatcgcaacagttttattcaaaaataaattcactaaagatcaaaaagaagcaggtttgacgaatatcgtgatgggcttatcttttgttactgaaggtgcgattccttttgcagcagctgatcctcttcgggccattccaagtttcgtgattggttctgctttaactggtgccctagtcggtgcattcaatattcaattgatggctcctcacggtgggatctttgtggtccttttactatcaaaaccattattattcctattgttcatattaattggtgcgattgtttcaggaatcatcttcggtttgttaaaaaaagaagtaactaccgcttaatacgtgttgtgtgaaacaactagcgtctcctatgcaaaaaaatctccagcgtgtttgaaacacactggagatttttttgcgagaatcattcaacttccttgtctttgctattttatatggctctatttatttccagaaatggattggtgttcagctaagcgttccatattcataaaatagacccgcaagcgatgggtttctttttttagattgacccaggtatattttttgctgcgatgcaataaaccaaagcgaacatctgacatacgatctttcaattcgtcgataggaatatctgtcatcgcctcttgcggcaaatagaactgcaaacaaacggtgtattcttcaaaatgttccgtagtgtaatccgcctctaaatgactgcgaatataaaattcataagcatctaagccattatcgagcgttaactgtggttttaagacaatgtaatccatcatccgcatgccttcttggtcgatccaagggaaataagcctgtgcattcaacaatcccctcacccgacgttcttggtaaatctcacgaactaaatcaaagttccgagtgataaaatgggtcgctttgcgtttgacggtgggctgtaaacgatcattttgatattggatcgtttggatcaactgatggccaaacgcgtattcaataaacggttctcgcaaaatccctactccgttatcccaagtaagttgatccaccccgatttggtcccgaaacaaacgttgataggaaaggttggcaggatgatcccattgaaacggatcacggtaaagctccaccatgacaaccccttcctccatcgtttggatttgttctacttgttgggcatctttaataatcactaacggcaacactcgctcatagtactctgagaaatacatgcgccaacaggaagttaaacaaaacccgttataaaaaacatcatatccggcaaattgattgcaatcgatcacgatttctttggcatggttttttcgctttggtaattcagcgatttcttctggtttctgaaagttatagcgtttctctacactttcgacattatgattgaggaattcatcataagctcgaatataactaaagagaccgccttgttccattgtggtctttatataactcagtaatagttctcgcgatccctgaaaaacatcaaatgtaaaaagatgtcgttgcagtacggcttcttggacaacgtgtatactggattcattttgtccatcggttaaaatcagttcaaaattgacctcgtcaatacttccctccagcaatgagcgtacttcagcgatatcataggagtggatttccttttgatttaaatagtagctggtgggggtaaaggaaagacggaccaaagcgaaccagttggctatttgttcacgcatcagagcatcggcgagttgtgccgattgaataaaggcatagattttcttcgttttgatcatctttctcacctctttatgtacttcttattttattatagtaaagggattcatgattgaacactatttcgcttacttttgagatgaaaaactttggttttcatggtaaactagaggcgcttggaggtgggaatatgggattaaaattccaacgtgaagattctcttgataaaatgttcgatgagtttgctattcttcccgacaatgacgaaaaagagaacaaacccgacatcgaacgcttcttgaatgcgaaagaagataaagaagaaactgaaaaaaatacggatcttaaaaaacaaacaaaaaaaacatcctaatcgatgttttttttgtttgcacagaatttttccgataaaagatgttccggagcaaactttctccgtttattttctagtcctgagagattgccccatgcatcttacctcttatctattattgcttgatggccgcttctatcgcttgccaagcttcttctttcccctgtttagtgatggaagaaaaaagaataaaggtgtctgctggatcgaattccagcgcttttttgatcacactttcatgcttgttccatttcccgcgaggaatcttgtctgctttcgtggccaccacgattactggaatctcataatatttcaaaaactgatacatttgaatatcttcctgagaaggcgcatggcgcagatccactagagagacgactgcccgcagctgctgtctctctgcaagatacgtctcgatcatcttcccccactttgcccgctccgtttttgaaacttttgcatagccatatcctggcacatccacaaaatgcaaggtgttttcaatcaagtaaaaattcaatgtttgggtcttaccaggtttcgaagacgttcgcgctaaattttttcgattaatcaatgtattgataaaggaagacttcccaacattggaacgacccgctaacgcgatttccggtaaatgcgtatccggatattgtgccggtgaaacagcactgatcacaatttctgcatcatgtactttcatctgctcgctcccttctaataaaatctcatatgctttcagaaagaaagtcggatagtcatcaaactatccgacttactaaaatcaaactgctttttttgtttcttcattataaatgattgtcggttcaccgatttctttggctgcatcttcggtaataatgactttttcaatcgactcatcagaaggaacattgaacatcacgtccatcatgatattttcgataatcgaacgtaaaccacgagcacccgtattgcgttcgatcgctttatccgcaatcgcgcgtagagcagctggttcaaactcaagctcagtatcgtctaatgctaacagtttttggtattgtttgactagcgcatttttcggctccgtcaaaatacggaccaagtcatcggtcgtcaatttgtctaaagctgccataaccggcaaacggccaataaattctgggatcaagccgaatttcaacaagtcttcaggaatgatatgttgcatgatgctttcatcttctgagaaccgtttgttgttcgttccaaaaccgatcgttttttcacccatccggtttttaacgatggtatcaatcccgtcaaatgcaccaccaacgatgaataaaatattcgtcgtatcgatttgaatcatttcttgatgaggatgcttccgtccaccttgaggcggtacacttgcttgtgtcccttccaagatcttcagcaacgcttgttgcaccccttcacccgatacatctcgcgtgatcgaaacattttcgcttttacgagcgattttgtcgatttcatcaatataaatgatgcccttttctgccatttcaacgttatagtccgctgcttgcagaagtttcagcaaaatattttctacatcttctccgacatatccagcttccgtcaagctggtggcatcggcgatagcaaatggcacattcaatgaacgggccaatgtttgagcaaggaacgttttcccagagccagttggtccaattagacaaatattgcttttttgcaactcaacgtcttctgcggtcggctcaacgttcactcgtttgtaatgattgtaaaccgctacagcaagtgtctttttcgcacgatcttgtccgatgacgtaatcatttaatatatgcagcaattcttgtggtttaggtacctcggtaaattcacgaatggcttcttcgtagaactcttcgtcaatgatctccttgcacaagtcgatacattcattacatatgtatacaccaggaccggcaacgatcttctttacttcctcttgcgtcttcccgcaaaaagaacaacgaacagcgtcatttccatttgtgttgtcgtacatactgttcaccccttgataaatttctaacctgtaaaggagtggaattggttttactatctttacagtctttaatcatcttatcataactcatttgaaagaaaaagctatttctcatggccgttacgttttcttagcaattgaccacgtccgcaaaataagtcaagatcctcctgctcaaaaaggcaaagtaagcaaaaaacgatcgtatgaaatatacacaccattgctttttgatcaatcaaaaagggcaaacatcggaaaagacgtttgccgctcttttgatgaaaattaagcttctttcgccgtaccagttacgatttcaacggctttcttcattgtgatgtcatgtttcaacatatcttctgtcaagacgcgtttgatttgatcaacaggcatgttgtaagcttctgaaagctcttgaatttctttttcgatgtcttcttcagttgcttccaaaccttctgcttttgcgattgcttcaatcacaaggttagttttcacacgagtttctgcttcgccttcaaattgttgatgcaagtcagcttccgttgaaccagtcaattgatagtacatttctggtgaaattccttgacgttgcatgttgttcaagaactcatccattgagcggtgaacttcgtcatggaccattgaatgtggtaattcaacgatttctgcgttttcaactgcttggcgaatcgctgcttcatcttttgcatcttcagcagctttttcttttgtttctgtcaattctttgcggtatttttcttttagttcagcaagtgtttcaacgctatcatcaacatctttggcaaattcatcatctaattcaggcaattcttttgctttgacttcgtgaactgttactttaaagaccgcatctttacctgctagatcttctgcttgataatcttcagggaaagtgacgttgacttctttgctttcgccagctttcactcctactaattgatcttcaaaacctgggatgaaagagttagaacccaattctaatgaatagttttcgcctttgccgccttcaaatgtttcttcacctaagaaaccttcaaagtcgataacgactgtatcgccattttcagcagcttcgtcttctttgatgactagctcagcttgtgcttcttgttcacgtttgatgcgagcatctacgtcttcttctgttacttcacgatcttgtttttcaacagtcaactctttgtaatcaccaagtttaacttctggtttcacagtcacttctgctttgatcacccagtcttgacctttttccatgctgtcaacatcgatttttggttgtgatactggatcaataccagcttctttaactgctgcttcataagcttctggcaagacagcattcaatgcatcttcatacaatgcttcttctccgtacatacggttaaatacttggcgagatacttttcctttacggaagccaggtacgtttaagttgcctttcactttattaaatgcagtcgtcaagcctttttggatttcagcttgctcgatcgaaaatgtcaatacaccatcattggtgcctgttttttcccattttgcagtcatttatttccctccgaataacaattatattttacatatgaaatagtttcatgcatacctttaaatagtacactaacgttctttaattgtaaacattttacctagaaacttctcgtttttttcttgagtgatctgctttcagaattagaaagaacccaaaatctttcgtaatcttgttttcttacgttggatctcctcgtcgatcgcttgtggttcgctttttgcaaaaagatcttgatactcatcgatatagctttgtacccagcgatcaatctcttgggtttctggcaagaacggatagcttaaagcaaaatgatcattcaactcttctaaaatgccttctgctaaggttggattttcttgcccgattcgttcattcacagcttgtcgcatttggctgaaaactggcacttccctcaataaagataactgattgggaatgatctgccgttgatcccccatgtagtctatcaattcaaactgctgtgaacttcctaaacggacaagttcttctactagttttggtaacaaaaaaggattcgttaactgaggaagcagctccgtcatcaacgatacaaactgatcctttgtgagtccttgggaaaaaacgtgccatgtgtgcccgctaactggttggttgctgctgtccattgcaagcaatgactgtttttttcctaaaaaatcttccaaaccaagtatttgttgaacttcttctactttatccaattctttcactaaattttcgcttgccgcttcagagatcaccgaaaattcctctgcgagtcttatccattttctcgcttgcaagtattgaccatcaagaatcaacaaatgaccaatttgaacaaaaccatttggatcttgtaggtattcatccaagaaatcatctgccacttccaacgcttttgcaaaatcagccagttgctgtaagcacttaacgagagactgattgatctcaaaagaagaatgctcagtataaatttcctggtaatcatggtaagccttcagataatcttttgcctgatatgctttttctgctgaatgacgcaggcggtcttcaggttttggaaactggatcgtgtctcccatatctcattctcctttatctgtaatcgatctgcaatcgcacttccgcttgtatggtgcaatcttctggtagcaagaccgcttttcaacgggtcagtcttcgtttgcctcaaatagagactgaccgctcattacgctattgtctattcttgttacatattggcatttgcctgtttattgaatgctttaatcaaattgatagtaaccacactggtctcagaaaaataatctccggcatgctgcttttctttagtaaaaatcactggcaaataaccgcaataaaagaaaggattgaattgcaaaacgtagcgcatacacagttctcttgtcagaactgttttccaactcaaatcagcttctgtaaatgacacgacccgaataccgaaaatcatcttacctaccgtttgtccctgattgaactttgttaataaaacaaaatagcctaagtagatggccaacgagagtaactggtagagtccaaaaggatgcccgctacttgaccaaccacctaagtgatagatcgtatccagagtaattcctgtaatagctccgatacaaagtacatctacgagataagcaaatagccgaatccaaaacccagcaaaaaagtaatctggaaaatcattcactcgtctgcgttctttctgtttgtcttctatcccctcataccgttgccattctttttgtcgctgatcaatctcttcctcgctaaattcttttctcttaaacgagcccaatacttgttgatagaaatcatctggatgattcgtcacagcggcctcttgatttggggtatccacagctagttgtgcttcttgattcgcctgctctgtagagattccagaggtcgactctagattttccagagttacgttttctgctccctgttcaacaggttgttgtttgattcgtggctctttcgtttctttttcaggcatagttattcacctccataataataaagaggtttcggcgcatccatcgtacccaggctttctactccttgcaaaagacgactagactcagatgccttcagcccttgaaactctgccagctttgaacccagccatgtagaagcgaaccctgtggaaccgacaccatattcaaaaatttccgcatcctctaacccttgatctgcttctaatgcagcgaaggcgtcctcaggaaacccaatttcgtcaactaacccgttctccacagcttgttgaccatcataaatccgtccgtcagcaatttttctaacagcttcatctgacatgcctcgtccttcagctacaatggaaacaaagcgtccgtatgcattatccacgtaagtttgcagaactttcttgtcctcatcggtagcggctcttgtagaggaacccatatctttcaagtcaccacttttataggtgctatcttcgatccctaatttatccaataaacctgaataattcaatccagacataataactccgatagaacctgtcacggtttcatctgtggcaaagattttgtccgcacccgctgagacataataaccaccgctagctgcggtgttcttcatactaacatagacaggaattccaatttctttgatctttttcatttcacgagcaatctctgcactttcgtaaactccgcccccaggcgaattcacttcaaatagaatccctttgatcgttgggtcctcttgcgcggcacgtaattcttccagaaataattgatgatcatatccttctgttgagaacaatccaccacctgaagtattcgcaatcgtcccttccaaagtcaagcgaaggatgcggttattgctatctccagccgctatttgatgttcctccaattcattgcttccgtataaaagagcattcaatccgtccagtgacgactcttcatttgctggcggagccatcaaagcaaaaacacctgagcacacaaacaatccaattgcaatcgcaacagccacccatcttctcttattcatttttccactcctttttaatagcggttctcaatcacaattaccgcttcaactagtccacttgcatcgaatttttcgcttttttctttcaatgcgtagccgccgaaatattctttagttaattcatcttgcactcgaaacgcttgtgcttcttgaacagagattgcacccggaagaatttcctgcaggctgtcccaaccagtgtctaacatgatttttgtatcatcattgacattttcttgtttctctaatctttccactatttcctttaactcggaaaacgtcatacattgtacagtttctgacatcttcatccctcactttcttctgtcattgtatcgaaattaaaaaaaaaaggatagtcaaaaaggacaattccaattttacgaattggatcatccgcaattctccttctttaaatctccattacagaacaaacattgcctctgataacatctataccaattattttttttagctttttctattgactaacgcccttataaatattatgataatgcatgtatttctacaaaataatttaaggaggatagatagaccaataggaatagcgccagatctgtacaacagatgacgaggagagagtttatcgaagttttcggcgggtaactctagggactgcactctataagcaagaacaaaacctcatcgtgagatgaaaacaaacctcttgctgcgcaggtagaaatacataatgaatcgtaaataagtagtggaaagtaggatttgtcattatgtgtggaatcgtaggaattgtaggaaaatcaaatgctgaacaagtcattttgaatggtttggaacgtttagaatatcgtgggtatgactcagcaggtttatatgttgctgatcgtacttctggccacttagtcaaagcacaagggcgtatcaaaaacttggaagacaaagtcacaccagaagtaacaggaacgatcggtatcggacacactcgctgggcaactcatggtaaaccatcagaaaaaaatgcccaccctcatacttcttctaaccaagaattagtactggttcataacggagtaatcgagaattttgaagaattgcatcaaaactatttaaatgatcatcacttcgaaggacagacagatacagagattgtcgtccacttgatcgaagtattgaaaaaagacctttcgactaaagaagcgttcaaaaaggcactctcattgattcgtggttcttatgcctttgcattagttgataaaaatgaccctgaaaccatctatgtagcaaaaaataaaagtccgttattgattgggcttggggatgggtttaacgttatttgtagtgatgcattggctatgctggatcagactactcatttcgttgaaattgaagacggtgaaatggtaactgtgacggcagaaacgattgaaatcgaagacctaaaaggaaatcttgtttatcgcgagtcttatgaagcacaacttgatttaacagacatcgaaaaaggaacgtatccttactatatgctgaaagaaatcgacgagcagccagctgtgatgcgtcgtctcattcaagagtatcaaggcacaggagaagtgacgatcgatgacgcattaaaggatcaaatggttgcgagcgaccgcatctacatcgttgcttgcggaaccagtaatcacgctggttgggccgcaaaagcgattctagaatctctgacacagattcctgttgaagtacatttatcaagtgaattcggctacaacatgcctttgctgtctgcaaaacctttctttatttttctatcacaaagtggagaaacagccgacagccgacaagtcttggtaaaaatcaatcaaatgaatttgcctagtctgactattacaaatgtagcaggctcgactctttctcgtgaagctgaccatacattgttgcttcatgccggacctgaaatcgccgtagcttctaccaaggcctatactgctcaaatcgcagttttaaccttattagcaaaagcaatcggtgatgctaaaggtattgctgctgcacaggacttcgatgttttccatgaattaagtattgttgcctctgctatggaaacattagttgatgaaaaagcggtcatcagtcaattagcagaagattatttgtctgttagtcgcaatgcgttttatattggtcgaagcaatgactattatgtttccatggaagctgcactgaagctaaaagagatttcttatattcaagcagaaggatttgcagctggcgaattgaaacatggaaccatcgcactgatcgaagaaggaaccccagtcatcggaatcatcactgaagaagtgaccggctcccatacgagaggaaatttgaaagaagttgagtctcgtggcgctcatactttagtcatcgtcagccaagaactagcgaaagcgacggatcacattgttttgccttcggtccatccattggttactagtttagttgccgtgattcctacgcaactgttggcttactttgcaacattgcaacgagggtatgacgtggataaacctcgaaatttagctaaatcagtgactgtcgaataaaacttttaaaagtttttaggcagaaaaaagagctgcgacaagacgattgtcgcagctctttttttcgtacaaccaattaaaagcaatttttttagacaagctgaaactgcttggaattgcctattttgatcatcctttcttttctcgtccctcaatttttttaaagtcttttaagtaatgcacaaaacagcaagcagcattcatcccagattcagtgcacctctgttgatcaacataggagaaatgtatcatttctttacacaccacgtgccatttatgatgattatccctactatcgtcagtaaactagttgcaacgaataaaatattccccattaatgaccagtgatcactaaaaagtaatgaaagcaggatgaaagcacccagaaccaacataccgatgccattcgctacatacaaacgatctaaatcatactgtgcctttttttcttcagaagccatattgtatccagcaatcaattgccatccatgtctgcttaaaaataggatacctgtaataaaaaacaaacccacgactaaccatcctgttgtatttcccatcacacattcatcctctctacacgtctgcctaacgtttagatccattcaccaatcggtttcttgcgctttatacagtgagtataccacatgaaaatcattatttggattatcattatattttcacaagataaaaaaaccaacgaaaacgactttcgttggtttttgatctcatttattccgcaccgatttcttcccgtacgacagctgcgattttaccgacataataatctactttttctgttgttggtgcctcagccatcacgcgcaatagtggctctgttccagaagggcgtactaagattctaccttccccattcatttctgcttctgtttcttcgacgatttttcggattgccggtacatccatcgcgccatttttatctgtcacacgaatattaactaatttttgcggatagatcgtaacttcccctgccagctcagaaagttttttcccagtctgcttcatgatattcaataactggataccagacagcattccatcccctgtcgtattgaagtctaagaagatcatgtgtccggactgttccccgccaaagttgtagtcatttttgcgcatttcttctacaacgtagcgatcacccacttgagtaatcacatctttcaaaccaatggcttcaacagctttatgaaaacctaaattgctcatcacagttgtaacgatggtatcttgtttcaaacgtttttgttcagctaagtattttgcacaaatgtacatgatcttatcgccgtcaacaatattaccttgttcatcaatagcgatcacccgatcaccgtctccatcaaaggctagtccaacatcggcccctttttcgacaacgaactctgctaatttctcaggatgagtggaaccaacaccatcattgatgttcaaaccattcggcgaagttcccatggtataaaaatcagtttctaagtctgcaaacaaccgattgacacttgtagcagtcgccccattggctgcatctacacagacggtgatgccctctagatcacccgggatcgtttgacggagaaattgggaatacttcaaaagaccttctggaaattcatcaacggttcctaaaccttcagctgacggccgtggtaacgtatcttctgcagcatctaataaagcttcgatctccgcttcttgttcgtccaccaatttgaagccatcattaccgaagaatttaattccgttgtcttgtgctggattatgtgatgctgagatcattactccagcactagctttttggacccgtgtcagataagccacacccggcgttgagatgacgcctagttgaaacacttcgattcccacagatagcaaaccagcgatcagtgcattttctaataactgaccagagattcgtgtgtctcgcccaactaagacgcgaggtcgacgatcgtctgtttcatgttgactcaatacatatccgccatagcggccaagtttaaatgctaattctggtgtaagttccttatttgcttctccacgaacaccatctgtaccaaaatattttcccataatgtattaccctctcttattctttactctcatctgaagttgtaacagttgtttcgctttctgaatcacggttttcttcactagtagatgattcactagtttcatctgatcgagattcggcagatgactcgttgccagtttgaccattcgtttccgttgattggaaaacaggtgtcacttggatcgtcactactttaggatcaatcgtcacaccatctggcactggcacttcaacagttcgctcaacagttgaggtgattcttgaaatatcgattggtacgccaatttgatctaatgtatctaaaatagactggctaccagaaatcgttccgctgattgcactcattctatagataaaatgggagatgccgttaggaactgttccttgctgggtgacgaataattccacttgttttgtcggggcttctaatgttaccgttacgttaactgtttcgggatctggcaaaattgctaatgcatttttagcggtatcccacgcttgtatcgttcctttgactgttgaagaggacgttccgatctcattaggatcaatgacagccaccacacgatcgatatcatttaaggtgcgatcacccgtagtgatcgctactttctgaggatctgcctctagagaagcgatagaatacccttcctttatatctgcgcccgatatgactggttcaacagtaaatgtttttgttactttcttttcaatagtcactgtgatggtcttcggctcgatttcagctgttacacccgaactcaaattctgaacttctaaaggaacttcatgcgttccttcccctaattcagagagatccgccatcacgcgaaagtttcgtgtctcatcatttttttctgcattcaactggatacgatttcgacttttcaaggtgacattcacggtggtttcatacccttggataaaatagctatctgtatcatacgtcgtttggatgggaacattgctaagatgttcttcataaccactagtagagccggatagattgacttgcagtgtggaaccactagcaataaaaaacaacaccaaactaaagaacagcgctagtataccataaaaaatatttcgttggcgttctttcttaatcattttcttccccctttgttcacaccgtcaaggaaagattgcagtagattacgttttgctgttttttcttcaggcacaagctctcgattcaaaatatccaagtattgttctcgagataacccagataacaattggttgttcatagtgatactgacatccccagtttcttcagacacaacgatcgtcaaagcatcactgacttctgacacccccactgccgcccgatgcctagtcccgaattctttaggaatcaacaagctttctgaaaggggcagatacgcactcgaaaccgcaattttgccgtctcgtataatgactgctccgtcgtgcaaaggtgtgttaggaataaaaatattgatcaatagttctccggtaatatcggcatccaaggcaatcccagtttcgacatactcttccaaaccggtagttcgctcaattgtaatcaaggcacctattttgcgtttcgccatatactggatcgctttatctaaagattggaccatcacttcgtcttcgtgcttttcagacttagaggtcttgaatagcgaactccgacctaaatgttccaaacctcgccgaatctccggttgaaaaatgacaatagcagcgatcaccccataggtgattacttgatccatcagccatgagagagttctcaaaccaatcaaacccgctaaaaaacgtaagacgataaacagcccgacccctttgaatagctggatcgccttggtccctctgactaactgaatcaatttgtagaccacataccagacaactaaaacatccaaaacattgattaaaaacgaaatagaaaatatattaaacgagaaaacttctctccaataatcaaaattaaaaaaatcactgaaattcatcgacataaacagccttcctttattcttaagacttcaaataatagtataacataggacttcttttaacacgttgaaaaaaagcaaatttatctcatttttccaaaaaaaatctcacttttttctggactctcgattattggataacacggttgacctttgcgtaatggagcttaaaaaaacagctctgccagatactggctagagctgtgacacttgcctattctgatttttttctccgctccgctctggcagctcttcttgccgcgcgaactgcttcgacttcaggatcagagactgatctacgctgtttagttctaacagattctccttgtttttccaccgattgaggttctgcttcagacaatggctctttttctaattttgctcgaatcttttcttcttgcccagcaagacgcgcataattatagaaacggtttttggcatccaagactgtttttgtgaataatgcacttgcagcacttgggttagctgcacctaaggctgaaaaacgaacctgtgttttcataaacgttggcatcaacgaaaaatcaggttttttatagtctagtgtcattgctggcttacctttttcagtcattaatgggttgtaacggtatagagaccaataaccggaagccactgcttcttttgcttctttgatggattgtctcatgccacctgctaatccatgggtgatacatggtgtataagcaatgatcagagatggtccagggaatttctccgcttcttcgaaagctttgatcgtctgcatttgattggctccggaagcaatttgcgccacgtatacatgaccatatgtcatagccatcatccctaaatcttttttcgacacatatttcccactagctgcaaacttagcaatcgctgaagttggggttgctttagagacttgcccgccagtatttgaatagacttcattatctaaaactagaatatttacatccgcgcctgaggccaagacatgatcgattccgccaaatccgatatcgtaagcccaaccatcgccaccaatcatccattgacttggctttacaaacaagtcgctgtcgtcaagaatcgcttgcaaacttggctgttgatgaatttcttgttgtaaagcagcctgtaattttgccgccctctgttggcttcctgcactttcttcccgatgatcgatccagtcttgcataatcccttgtagatctatcggaacagtgattaaggctgcctgcatttttgctgctaaggcttctcttcgtgtttgatttgctagaaacatcccataaccaaattcggcattgtcttcaaatagtgaattggaccatgccggtccttgcccttggtcgttggtcgtataaggagacaccggagcagcgccgccccaaatcgatgagcagccggtggcatttgcgatcatcatgcggtctccgaacatttgagtcaacagtttgacatacggagtttcgccacatcctgcacaggctcctgaaaattctagaagcggtttattgaattgggtgcccattacggtacccggttttgccggattctctttctgacgtagtgtcatagcaaaggcccaattcattgcttgctctttttggctttcataagagctcatgaccaaagctttgtcctttgcgggacacgcttcaacacaaagcccgcagccagtacaatcttcaattgaaacttggattcgatacttctgaccatcttttcctcgcatttctcgaacaataaacccttctggtgcctctgtcagttcatcttcatccactaagaaaggtcgaatcgctgcatgcggacaaacaaatgcacattcattgcacatcgtacaacggtcggataaccattctggcacttctaaagcaatccctcgtttttccactgcagtggtccctagaggcatcgctccttccgtcatttgattccgaacgagcgtccccactgataattgattgccttcctgtcgattgattggctcaacgatctcccgaacataacgggatgttgcagttgatttccgttcaggcacatcaatgaaggcccattcagctggcacttgaatctcgtaaagcaattcaagggtccgatcaatcgctaaatagtttttttcgacaatttccatggacttatgtccgtaattctttaatacctccgcttttaaaatcggcagaacctcgtcgaaaggcataatatcagacaaatagaaaaaggcagtttccattgccgtgttgatgcgtctgccgagcccagtctccattgctaattgcatggcattgatggtataaaaacggatgtcattttctgcaatgtaacgcttgatgtgtttaggaagactagttgcaatttgttgctcattccaggtggtatttagtaggaaggtaccgcctttttttagccccttcagcaaatcatatgtatgcagatacgcaggggtatggcatgcgacaaagtcagcatgctcgatcaaataagtcgagcggatcggtgtgtctccgaaacgcaaatgggagactgttaatcctcctgattttttggaatcataataaaaataaccttgaacatacttatctgtgtgatcgccaataattttgatcgctgatttattggcacccacggttccatcggagccaaatccccaaaatttcgcctgaaatgtattgggattggtcaagtccaaagtagcttccgtgttcaacgagagatgggtaacatcatccatgatcccaatcgtaaaccgtcttttttgctcactttttggtttcgtcagttcttcgtatacagcaacgatttgatctggcgttatatcttttgaacccaatccatagcgaccaccaatgacagctggccggatcgctgcatcataaagggcactttggacatctaaaagcagagactcaccgtttgctcccggctccttgctacggtctaaaacggcaattgctttgaccgttgatggaagtttttccaaaaagacttccaatggaaatggtcgatacaaatgaattgtcaagaccccgacttttcttccttgtttgagcaaatgatccaccgtctgttgtacagtctgagccgaagaacccattgttacaattacttcttctgcatcagcacagccataataatcgaccaaatcatagttggttccgcgcaaatcattaatggctttcatgtatttgcgaattgttgccggtaacgcatcgtaatgggcattgaccgtttctcgctgttgaaaatgaatatcggggttttgattcgttccgctaaccgttggatggtttggattcattgccttttcgcgaaaagctgctaatttttcttgatcaatcaattgagccaattcactgtattcaagtacatcaatcttctggatttcatggctggttcgaaaaccatcaaagaaattcagaaagggaatcccactttcaatcgccgctaaatgagccacaggtgcaagatccataacttcttgaacactgctttccgccaacatcgcaaagcctgtttggcgagccgccatcacgtctgtatggtcaccaaaaatattcaatgcattcgtagtgactgctcggctggcaacgtgaaatacgccaggcaaacgttctcccgcgattttgtacatatttggaatcatcaacagcaatccttgcgaagctgtataagtcgtcgttaaagccccagtctttaatgaaccatgtactacaccagctgctccggcttctgactgcatttcaaccactttcactggttgtccaaaaatatttttctttccgctggcggaccattgatctaccaattccgccattgttgaactaggggtaataggatagattgcggctaattctgtaaaagcataagaaatgtaggctgccgctgtatttccgtccattgtttttttcttgcgcatctctctaacttcctttatcttccattttgagcattctcacacaatccattatagctgaaaaatctacttgaataaatactgcaaatcaaaatagcagcgatttagtgaaagagcaaacgatacagtttctatctaatctaagattttttcacaaatttcatttggttgtttctccttttctttctagttgaaattctgttaaacttaaaaaaaaggaggatgaaacatggatatttcaattatcaaagctaaagaaacaaatacgactactggaatcaagattggtgatgaaaatgctaagccaatcattgaattcatgaatcttcgttgtccttattgccgcaaatggtttgaagagtcattgccgatcctaaccgaagctgttgctgcgggaaaagttcaacgagtgatcaaattattcgataaagaaaaagagtctcttcaacggggaaatgtgatgcatcggtttgtagcaacggataatcctgctcaaacgatcgcagatattactaaaatctatcaaacacaagatcaatggggacatttaactttagaggaggttgcagaatttgcgcaaaaccagctaggattaaccgaacataaccattccacgtatgctggtgaaatcgtggaagaagcccgaaaagcaaatattcaatttgtgccgaccgttatcgtaggcagtcacattttcgatgaatcaatctcagcggatgagttgacacaattgatcaatgaataaaacctgtgccacagttctaacagcaacccacttttgaaggataatcgactcgcacgtgcggtccaacgaagccaaaactacttgatacttagccgttttagcttcattctatcccttcaactgttgtcttgttatgacctgtggcacaggttagtttaactgactttatctcgcaaacgatccgcaaattcattgattttacggattcgatggttgatgcctgatttggagatcgctccagaaggaatcatctctcccaactccttcaagctgacttcaggatgttccaatcgcaattctgcaatttcctgcagcttctctggaagagctcccagccccacccgttgttgaataaattcaatattgtcaatctgtttggaagctgcatcgatggtcttgttcatatttgctgtttcacaattcaccaaacgattgactgaattgcgcatgtcgcggacaatccgaacatcttcaaacttgagcatcgaattggtcgcgccgatcaatgtgagaaaatcggcaattttttctgcgccctttaaataagaaataaagccatttcgtcgttcaagggctcgcgcattcaatccataatagttcaacatatcgcagatatcttgattgtgctcttcatagatcgaatagatttccaaatgatagcggctggtctctggattgttgactgaacctgatgccataaatgccccccgtaaataggaacgcattttttgggcattccccataatttcatccgatacatgactatgaaacatcaatccatccataatatctaaatctagcaatacacgtttggtctcttgttttaagcgaacgatgtaaacattgttctttttcaacttcatttttctacgaaccaacagctcacttcggacattgtagtgatctttcaataaggaataaatccgccgagcaatggcagcattttctgtttgcacattgagaacgaactgctggttgttaatacttaacgatccattcattcgtatcaaagcagctaattctgcttttgcatgttcccgatgtacttctagtgatgtcagttcctttttgacttctgctgcaaaggacatagcgtcgcctcctttctagattttggcaccgtagacgatccgcagtaattcatcgatcactttatcaccgtcatgaaagacaccgccatcacgtaactctaagaaatccgctgaaaccacgcgacaactttcattccgcagtccttggaagtcatgtttcacttggacaaggtattcatcgtagatttctggatccatatagccttctgggaccttctctgtattgactaacacggtatcaataaaagacttccctaaatgttgatgcaaaactcgaacatgatctgcatcagtaaagtgttctgtttcccctttttgcgtcatgatattgcagatgtaaacagtctccgctgccgtttctagcaacgcctgtccgatctcactgatcatcaaattcggcaagatactcgtaaacaagctacccggtcctaatacgatcatatcagcttctaatatcgacgtcacaactttacgtgcagctttgggttcattttcgtcatcttgattccgcacaaacacgtgatcgatggttttacgatccaaggcaattttggattctcccactgcttctgtcccgtctttaaaaacagcgtgcaaaatcaaaggttggtcagaagagggatagacatggccatcaatgtgcatgatttttgaaagtatctggatcgcttcataggtactgttgcgcatttccgcaatggcggcaatgatcaaattacctaaggcatggtttgcaagaaatttgtcttctttcttgaaccgatactgaaaaatatcattatagagttgcggcatatctgacaaagcagccagcacattgcgcaaatcacctggaggcgaaatagacgaaactaggttgcggatctcaccactgctgccaccatcatctgcgaccgtcacaattgctgtgatatcaacaccttgattccgcaaactttttaaaatgaccggcaggccagttccgcccccaatgacaacgatcttaggtttacggattcgataggttttcattttcatgatcgattcaccgtctctttgcgcttatctttgtcacgatgggtcacattgactttgtaattttttgctaaagcagcgctgatccgttcagataaagcgaccgaacgatgttgtccgcccgtacaaccaattgcgaccgtcaaactgctttttccttctttgatatacccaggcattatagtttcaagcaatgtctcaaattgctgataaaactcttcagtttctggaaaagacatgacatagtcatatacggtttcatcttttcccgttagcggacgcaattcgggtatataatgtgggtttggtaagaatcgcacgtccatcacgatatccgcatcgataggcaatccgtatttgaagccaaaggaaacaacttccacccgaaatccatgttcatgggaagaacgaaattcttgattgatcttttctcgcagctgtcttggtgttaaagttgtcgtgtcgatcacgatattcgcttttgtcttcaagtcttccaagatcgcacgctctttacggatcccttccgttattaagccgtccatcgcaaggggatgggctctgcgtgtctctttataacgagaaaccaactcattgtctgtagcatctaagaacaatatttttgtatcgatgaatcgagtattctcgatatcgatcagcatgctttggatttcttcaaaaaaggaacgcgaacgcaaatcaacgaccaatgcaattttggtcactttccctgactctttgatcaattcccagaatttaggaattaaactcggcggcatgttgtcaatacaaaaatagcccatgtcctcaaaactttgaatagcaacggtttttcctgctccactcataccagtgatgatcactagttctaaattatctacttctgtcatcgtaaaactccttcctcactcattaacagtatatcatgccgggcgtatcatttaaacactaccgcacaaaaaaagcatcaacatgagagttgactcccatgtcaatgcctcgctcaatttcgataagttaacgctttttcaattgttcgatcgactaaaatcgattgcgcatcgactaccggataaggattattttccgtgaattcttccatcaatgaaagttcggtacagcctaggacagctttctcacaaccaattttatgtgttacttcttctaagatctcaaaataaagatcttggtctaatgtatcagattctttgatccgatcataaatcaatgtatttactttttgttgtaattgcggctcaggcaagtagacatcaaagccacaagcacgtaactcggcttcataaatcccagccttgatactaccttctgttcctaaaaaggccactttcccggtaacaccttctttttgcaaagatttagcagcttcccgcggcatgtgaagtagcggaatcggtgtggcttcttgcaactgatcaaagaaataatgcgcagtattacatgtcagtacaataaaatttggctgtaataagttctgtttagcgatgtcatcaagcaaataaggaacaggatcttctaaatcgttgttcaagatatacgcagtgcgatctggcactgtcgcatgattgaataacacatagttcaaataatcttggtctttatgagcaacggttcgacggttcaagattcgtacaaaactttcagtcgccatcgttcccattccacctaagatactaaagaagttttccatagactagccttctttcgaatggaaatgcagtttaaatcgtttgttgtaaagatagaacattctttttagtagaatccaacgtttgatggagagatctttgtcataaaaaacggtagtcccccagtgattttcggctagcagctttttagcccgttctttttcttcattttcattggcataatccaaaaagatgtttttcggtacacccaaccaaagcttcgctgttggagcatatgctttcccataaacagtttcttggaaaggcacatcaaatactaagtcttctgtcagaaatttagcaagattcaatccacttaatgtgatgaaaaagctacttctcccctgacgaagattgatttcaaataatttgtattgcccatctcggctatcatatttcaaatcaaaattggcaaagccaacatattgaatttgttttaagaacgtcgaaatcatttgatagatttgttggttttcatccggcagaataaccacgtaattgccgactgctccaggagttggatcttctaaaagtggatgacccaatgccatcactcgtacattatggtctttgtcaacataggcattcagcacacgcatattgctgtcatcccctggaataaaatcttgcacgatcatctcgtaattatagccagcttgataaatccgctcaacaatcttatcgaactcggcacgaccttcaataataaaggctttcttccgtccttcgaaatcaacagataaccaggcgacactatttgccggtttcaatgccacgggaaactcaaatggcagttcttgagtaaagcggccatcctctaatagatctggtgtcaaaataaaagtttttggataaggtaagccaaactcttcacacacttcatagaaactcactttattgattaatcgtttcaacaaagaataatcattcgcaataaatgtgtaatatgacgctaaatctgctttatgtttcgctaacaattcagcataaccatccccgcaaggaatcaacaaataagccatagagggatcgttataagtggtttttgccaaatcaatcaatgtatctaaaaaaccaggatcatgatcaaatcctgctacttgattgaccttgacgattttgctatagcgggtgggggcaagctgtgtcccagcataagcaattgactggatgccatatgcttcgtgaaaggctcttgccataccatagacattcatatcgcttcctaacaaaataggaacgaatttttccggattcataaaaccactctctcttttgcatatataaatttagatttttacctatttactttgttacaacagacctataataccataaagaaaaaagcaatcaaagtatgtacctctgattgccttcctcttctttgaacggatagaacttataggtcgtttattctgttacgaatagacatttacctattgctattttaacaaataaacggtgcattacaagagttatttgagaatttgcagaattattacagtaaatattaaattttgctaaaatcccctttatctccgcctttatcctacctctctcataagactttcttgaggtattttccggtatagctttcaggaactgctgctatctcttcaggtgtaccagttgcaaggatcgttcctccgccctcgccgccttctggacctaaatcaatcacatgatctgctgatttgatcacatcaagattatgctcgatcactagaactgtattccctgcatcaacaaaacgctccaagactttcaataaacgagcaatatcatccgtatgcaaaccagttgtaggttcatctaatatatagaagctttttccgtgagaatttttgtggagttcactggcaagtttcattcgctgtgcttccccacctgataaagtggttgccggttgccccatcgtgacataccctaaacctacatcaacgatcgtttgtaattttcgatggatcttaggaatatgtttgaagaattcgacagcatcttcgaccgtcatctcaaggatctctgctatattcttccctttgtaatgcacttcgagggtttctgaattgtatcgtttgccgtggcaaacctcacaaggaacatagacatccggcaagaaatgcatctcgatcttgatgatcccatctcctttacatgcctcacagcgaccgccgcggacattaaagctgaagcgaccttttttataaccgcggactttggcttcattggtttttgcaaacaaatcacgaatgtcgtcaaaaacacttgtataagttgccggattacttcgaggggttcgcccgatgggactttggtcaatgtcgattagcttttcgattgcttcatatccggttagtttcttatattttcccggtttgttcgaattgcggttgattttttgtgctaaagcttttttcaaaatttcattcactaatgttgattttcccgaaccagataccccagtcacagcaataaactttccaagagggaaatcaacgctgacatttttcaagttgttctcagctgcgccagtcaagcgaatggactgtccatttcctgctcgacgttctgccggcgttggaatctcccgttttcctgaaagatattgtccagtcagtgaatgttcattagccgcaacttcctctggggtccctgctgcaacgatctcgccgccagcatgtccagctcccggacccacatcaattaaataatcagcagaacgcatggtgtcttcatcatgttcgaccacaatcaatgtattgccaagatctctcatcttacgcaatgaatccaataagcggtcattgtctctctgatgaagaccgatcgaaggttcatccaagatataaagcacaccagaaagattggaaccaatttgtgtcgctaagcgaatacgttgagcttcgcccccggacaaagtgccagaagcccgacttaaagtcaaataatccaatcccacattgcgcaaaaagcttaaccggtcatccacttctttgacgatcggttttgcgatcatcttttcttgttcagagagcgttaatttttcgacaaatgataaggcgttgttaattgccatctcactaagttcaccaatatgcttgccattcactttgacggataatgcttgcgggtttagccggtagccatgacaggttttacaggtcaattctgtcatgtacagacgcatttgttcccgggtgaaatcactattggtttcatgatagcgacgtttgatattaggaagaattccttcaaagggtacttcaacgtcccgtacaccgccaaaatcattttcataatgaaaatggaacatttcgccattggaaccattcaaaataattgcttggtgttcttctggcaattcttcaaaaggcgtgtccatgtcaatattgaattccaagcaagcttgttccagcatttgtggataatattgtgaactaatgggattccaaggaacgattgcaccttcacgcaacgttttgctagtatcaggaatcactagatcagtatcaacttctaattttacccctaatccatcacaatccggacaagccccaaaaggtgcattgaaagaaaacaaacgtggttctaactcgcctactgtgaatccacaataaggacaagaatagtgttcactaaacaacatctcttcttgaccaatcacatctactacagcgtagccatctgccaaacgtaatgcggcttcaaaagaatcaaacaatcgcgaacgaatgccctctttgacaacgatccggtcaatcacgatggcgatgtcgtgttttttatttttttccagttcaggcgcttcagaaacatcatagatttcaccgtctactcgaatcctcacatacccttctcgttgaatcatttcaaaaacttttttgtgctggcctttcttttgataaacgatcggtgccaacaactggatctttgtccgatctggcaatgccagtacttcgtcgaccatttgttccactgattgactagtgatctcaatatgatcattcgggcagatcgggtgtccaatacgggcgtacagcaaacgcagatagtcattgatctcggtcaccgtaccgaccgttgagcgaggattcttactcgtcgttttctgatcaatggagatcgctggactcagtccatcgatactatccacatctggcttatccatttgtcctagaaattgtcgtgcatatgcagacaagctttccacataccgccgctgtccttctgcataaagggtatcaaacgccaaagagctctttcctgaaccagacaaaccggtcacaacaaccagtttatctctaggaatcgtcacatcaatgttctttaaattgtgtgcgcgagcgccatggattacgattttatcatttgccattctcttgtctccttttactcagctgctttcaattccaagatcgtgtctcgtaaagtagctgcagtttcaaagtctaatgcttttgcggcatctttcatttctttttccagttttaataagagagttgctttctcttcacgagtcatgtcttcatacgaagtggttgtataatcgcctgactcttccgcaactttcgtaatagcgatcaaatcgcgaatttccttaatgatcgtttttggttcgatgccatgctctttattatacgcctcttggatactgcggcggcgacttgtttcatcaatcgctcgctgcatagagtcagtcattttatccgcatacatgatcactttaccatcagaattccgagcagctcgaccaattgtttggaccaaagaacgctcactacgcaagaatccttctttatccgcatctaagatcactacgagagaaacttcaggaacgtcgatcccttctcgaagcagattgatcccgactaatacatcaaattcaccaagccgcaaatcgcgaatgatctctgtccgctcaagtgtcttgacgtcactgtgaagatatttgactttgattcctaactctttaaaataatcggtcagatcctctgccatttttttcgtcaatgtggtaacaaagacccgttgatctttttctacccgctcattgatttctcctacaagatcatcaatttgccccatgatcgggcgaacctctactactggatccaataaccctgttggacgaatgatctgttggataacggtatccgtttgttcatgctcgtaaggtcccggcgttgctgagacataaacgatctgattcacatgttcttcaaattcttctaaacgtaacggccggttatctaacgcagacggtaaacgaaagccataatccaccagcatttgtttgcgggcacggtcgccgttgtacatcccacgaatctggggcatcgttacgtgagactcgtcaatcacgatcaggaaatcatcaggaaagaagtccagcaacgtgtaaggtggttcgccttctttgcgcccatccatgtgtcgtgaatagttttcgatcccggatgtgtagcccatttcccgcaacatttcgatatcataattggtgcgttgctctaaacgttgtgcttccaataatttgttctcacttcgaagaacagctaatcgatcttcgagttctttttgtatcgaagcgatagcatgttccatatggtcttcgttggtcacaaagtgagtagctgggaaaatagaaacgtgttctgtttcccctaaaatctccccagtcaacgcatccacttctcgaattcgatcgatctcatcgccaaaaaactcgatgcgtaatgcccgctcgtcccgcgatgccggaaaaatttctaccacatctcctcgaacacgaaagcgtccccgttggaaatcgatatcattgcgttcaaattgtatgtcgatcatttctttcagtagttgatcccgaggtttttccattcctactcgtaaagaaaccacttgcttagcatattcgattggtgaacccaaaccaaaaatacaagagactgaagcaaccacgatcacatcgttgcgttccagtaatgaactggtcgccgagtgccgcagcttgtcgatctcatcattgatacttgaatctttctcaatgtaagtatcactggaaggtacatatgcttctggttgataatagtcataatagctgacaaaatattctactgcattattaggaaagaattccttgaactcaccgtataattgacccgccaatgttttgttgtgtgcgataatcagtgttggcttattgacctctttgatcaagtttgaaacagtataggttttccctgttccagttgcccccaacaaaatctgcgccttcttgcccccaacgacgccatcgaccaattgatggatggcttctggctgatctcctgccggctgatattttgagattaattcaaattcatgggaagtcgttctttcgatcatcttcattccccctgtatttatatttgcgaagcgtccgtgaaacaaaaagaaagctgacgctttcccatagaatagtataccatagcgaacatactttcgccatcttttgtactttttattctgctagtttaactttacttaagatgtcagtttttctaacacccaatgtcagaaatagcgctgttttttgcaaatattgaccgaaagacttgtgtgtttttacaaaaatacctataatctaaaaatacgttaaaatcaaaagggggaattttcttgaaaagaaaatatatgttttgtgcactgttttcagtgattttctgctttttcgcttttgcgaacaagccagtcagtgcagcagaaacaacgtataaaatcggaacagacctgacatttgctcctttcgaatttcaaaacgaaaaaaatgagtatgtagggatcgacattgatctgttaaatgctattgctgaagatcaaggctttgctgttgatttgcgcccattaggctttgattcctcgttacagggcgtccaatccaatcaacttgatgggatgatcgctgggatgagtattacagacgaacggaaagaaacctttgatttttcagatccttacttcgacagtgggattcagatggctgtcgcaaaagacaaccaagatatcaaaacttacgctgatttgaaagataaaacagttggcgctaaagttggtaccgagagtgctcgttttctagaaaccaatcaaaaaaaatatggctactctatcaaaaactatgatgatgctagcgggctttatggtgccgttcgcaatggaacagttgtggccatctttgatgactatccagtcttaggttatgcgattagtaatggtgaagctatgaaacttgtgggtgagcctgaaaaaggggcatcttacgggttcgcagtcaaaaaaggccaaaattctgaattactggctaaattcaacgctggtctaaaagagttgaaatccagtggtaaatacgacgaaatcattgctacttatattgcttcatcagaaagcacttctgatgaagcaagtgaaatggttaaagttgaaccgaaaaaagacgtctatcgaatctcaagtgactctgcattcgcacctttcgagtttcaaaatgaagacaatgaatatgtcggaatcgatgttgatctcttaactagagcggcggaaatgcaaggattcaacattgagtttaatttcattggtttctcaggagcgctacaagcgttagatgggaatcaagcggatggtatgattgctgggatgagtatcaatgatgaacgcaaaaaagcgtatgacttctcagactcctactttgaaagtggtattcaaattgcggtcaaagaaggaaacgatagtatcaagtcttatgaagatttagaaggaaaaacagttggtgctaaagttggtaccgagagtgcagacttcttgattgaaaatgaagacaaatacggctataccattaagtattatgacgcagctgatcaactttatgctgcagtcagtggcggtcagatcgacgccatgatggatgattacccagtcattggctacgccatcagtcaaggacaaaaactaagtacgccgattgagaaagaagtgggcggacaatatgggtttgccgtcaaaaaaggccaaaatcctgaattgatccaaatgttcaatgaagcgttaaaagaaatgaaacgaactggcgaatacgatgaaatcgtcggccgttatatcaaagacggttcggctacagaaaagaaagccgatgaatcaacagtcgctggtttaatcaaaaacaattacaaagttttgctaaaaggtttatggaataccctgctgcttgcattgatctcctttgctttagcgttgatcattgggatcatcttgggactcttcagcgtgtccccaatccgagctttgcgtatcttcgccggtatctatgtcgatattattcgcgggataccaatgatggtgttagctttcttcattttctttggcctttcggatgcaattgggattacaatccccgactttgctgcaggagtcatcactttgacactgaacgctagtgcgtatatcgcagagatcgttcgcggagggatcaaagctgttcctgtaggccaaatggaagcttcccgcagtttgggattgacctatacccgaaccatgcaaaaaatcattttgccgcaagccatcaagatcatgatcccatctttcgtcaatcaattcgttatctcgctgaaagatacgacaatcatttcggttattggtgttgtggagctgctgcaaactggtaagatcattgtcgcaagaaccacacaaagtacctatgtttatctaatcgttgctgtcatgtatctaattgttatcacagccttaacaaaacttgctaaagttttagaaaagaaggtgaaataaatgaaggaaaaaatcttagtcgaaaatcttgtaaaaaaatatggggataacactgttttaaatgatatcaatgtctcgatccaagaaggcgaagtcgtttgtgttatcggtccttctggctcaggaaaatctactttcctgcgttgcttgaaccgtttagaagaacctactagtggtgatatcattatcgatggtgctcatctaatggataaaaacaccaatatcaatgccgtccgtcaacacataggcatggtttttcaacatttcaatctgtttcctcatctctctgtactagagaatattatcttagcaccgatggatttaaaaaagatgtctcgtaatgaagctgaatcaaaagccattcaattgctggacacagtgggtttggctgacaaaaaagacatgtatccagacaatctatctggtggtcaaaaacaacgggtagccatcgcccgtgcattagctatgaatcctgatgttatgctgtttgatgaacctacatctgcgttggaccctgaaatggtcggtgatgttttgaatgttatgaaaaaattggcaaaacaaggcatgacgatggttatcgttacccatgagatgggttttgctaaagaagtagccaatcgcgtcatgtttatcgatggcggaaatttcctagaagacggcacaccagaacaaattttcactagtccgaaaaacgaacggaccaaagactttttagacaaagtcttgaatatctaaacaaaatccgcagaaaacttggtcgttttctgcggattttgttattcatctgacattttagtttctcgttgctgctttttgtactgtgcttctaaagcgattcgtttctgcttttcaccaaaataaacttttgtatcgattggattggctttgttgaatcccccagcaccagtatccatcatttgcccccagcctttcagcggatcttttccttgtttccttaattcagcgttctttttacgcaattcttgtttcttcgcttctttcttttgctgccgctgctcctttatttccttaaaaaaactcatcccataccctcctttgatcaataaagaattgttccaatgactattaataacaaaacaacaactggatacatcaattctctgatccagtgtttttctttccaagcaagatacagcaaaccgccaatgatcagcaataaaatagtcggttcaaacaataagccaatcaaattacttgaataggttctggttgttagttgatcactccctgtgcttaacctaaaagaactgaaacgaaaaagaatgaaacgactgaaaacataacaagacaaaaacaccaatgaatacccttttgcaaaccaacggaatagtttgctaaatggaatttttttcaacaatactcattctccttccgtgattacatcttggaccatgatatctgagagctgctgcagctggactctcatgacaagcgatcgattctccgctaaccatcgagctaattcagtgcaagaggccgatacatgaacggcacttactttcacaccattatctttgacataatttagaatgtcgccgaaatcatagaaattgatttgattggtaagatcattggtaaaatggagattgtcaggactatcccagcctagatccccaaaagtcggataatatttttccaaaaaaaccagtccttgcgtgacgctttctgttacttgccgatcataatcatttcctgttgtctgacgaaccatttcatctgaataaccaaaaatattgcctgaatgataatcaatactataatgttgaacagacaaatcagccagtttttcccttagctcactaggaatttgaggattttttaaagtaatagaaatttcagcctgcttgtactcgccgagtgaacgtaaataggcgagaaaggagtcataggtcgaaaccgcattgcctggctcatatagtgttgcagagggagcaaatgcggtcagcgtatcgctggaaacaattgtctgaactgcctgatcaaaaatatagcgattttcgactgtgtacgcgaccgtcttctgatttcctaaacgagaaatgaccggataaacgtcctctttccccaaaaatgcaagcagagattgccgattgataggatcgtaatggaggtttcgctgtcccatctcataccaatagtagcggtacttctctaacgtatcattcttaagcgcatcttccgaatatggagcattcatcgccgaaggaatcgattgataatcctcgcggtcatttccggttgcacgataataggctaatggtaaaaagtagcataaaacaagcactaccatcccccaaaacaacacgctatagatcatttggagtaccatgcttttctttgtacgatccactgacttttgtaatcgctggtactgttttttatccatgtgaccacctgcttttcacttgttttctcgcttgaaaaacacgagatttcactgtacttaacgttagatttaatatttctgctatttcttgatagctatagccgcgaatcgccaatatcaaaggatgccttaatttgttaggcaattgattcacatgacggagcgcttcttctttttcaagactatcttggtcttcgataggaatctcctgcatcaaagtatcgacttcttccgctaccaaaagataccgcttacgacggtaaaaatcatatagtgtaaacttagcaatcgtaaagagccacctctcaaagtcatctggctttgtctttggcaaagccaaaaaaactttaacaaatacatcttgcgttaaatcctctgcttgatactcatcccccactcttttttgaaagtagtgctgaattttctcgtaatagatctgataaatctcctccaacactacccctccttacttatatagacgagtgaacaacaaaaaagttgcaaaaaaatattatagtaagaatagtatatcactgttactaacgtattcagaaggttctttctacgtaacaaaataaaaaaagctgtaaaccacgctgaaatgtttcgtgtggcttacagctttttagaatggatttaagcaaagacggttgaccagttctcccgttcggctaaaaactcccttgccaattgttgggcgccttctaaggtatggttggctgcccagccgcattggacttcgttactagctggaacttctgtcgctttcaacacatcttccatcgttttttctaacacagttaaaatttcatcataatcttcatgatttaaaaccgttagataaaatcctgtttgacagcccatcggagaccagtcaacaatgtaatcggcatgattacgaatcaattctgcggtcaagtgctctaatgagtggaggctagccatctccatatgtgcttgattcggttgtttcaatcgaacatcatatttgataatcgtatcttttgttccttgttttttgtcagcgacccgtacataaggtgccttgactttcgtatgatctagattaaagctttccacgttcattttcattctttttctcctctcgcttcgacgagccaaacaaaagcattgatttgtttaaagcgactggtaaaaccattggctcgaaaataggtttcaatatctggtatcaatgggtagtattctcgttgcagatccgctgctaatcgtaagtgattggctttgattgcctgtcttaggatgctttctttatgctcaggggataaaaacatcgtatcccctataatgacttttccgccttcagaaagcagcgctttatatcttttaatcactcgctgtttctctgtttcattcaagtgatgaaagacataactagaaacgatcgtatcgattggaaaattgatctgtggaaattgttccatatctccatcaataaaagttacctgtgacaactccggctttgcctcagctacttgacgcatcgcagccgatggctcgatcgcgaacactgttttctttcttcgaatcaactccaacgtcaaatttcccgtaccactaccaaattctatcacagaatctcctgctttttcagcaatatttgctaacaattctggataatgaagaaaaacctcccgatattcttcatccttccctttgacggtctcgtcatattgcttggcccactcagaaaaaatcggaatgaattcacgccccatcttccagcaccctttctaatccttgctttaagtccgtccataaatcggcagcgtcttcaatgccaatagacaaacggatcaagccatctttgattcccgctttttctctgattgaaggtggaattgaagcatgcgtcatgaccgcaggaacttcaactaaactttcaacgccacctaagctttcagctagtgtaaaaatagttagcgattcaacaaacgcagctactcggttttcggcttttaattcaaatgaaatcatcccgctaaaaccagacatttgttttttggcgatctcatgtcctttatggcttgataaccccggataataaactctagctacagctgcatgttcttgaagcaatgtggcgatttttagtgcattggcttgatgggcttccatcctcaaagccaatgttttgatgctccgctgaactagccagctgtcatgaggccctaacacaccacctatagcattttgcagaaaaccaatttgctcagctagttccgcttgattggttacgactaacccagcaacgacatcactatggccccccagatatttcgttgcactatgaatgacaatatcggcacctaatgccagtggacgctgaaaataaggtgtcgcaaatgtgttatcaacgatggtcaagagatcctttttcttagcaatcgtggcaacttgttgaatatctgtgattttcaacaaaggattagtaggcgtctccagaaagattcctcttgtttctggccgaatcgctgcggcaatccgctgaatcgcttggggatcatcagtcttgaccaatgtatacgtcaatccattctttttgaagattttctgaagcagtcgaaaggtgcctccatagacatcatctcccaacaaaatatggtctccggactgaaataaagaaaaaatagtatgggttgctgctaaacctgaagcaaaagcaaacccacgtatgccttcttccagttcagcaatcagttcttctaatgcaaaccgtgtaggattgcccgaacgagagtactcatattgttttggctgtcccacagctacttgcttgtaggtagacgtttgatagataggtacactgacagcccccgtttcttgatcttgactgatcccagcatgaatcaattttgtgcgaaattccatgtttatgcctcctctagttgaccataaatattttttgacaagtagcgatctccactgtcaggaaagatagtgacgatcgtgcttccctttggcagtcgcttgctttctcggatagcggctgcaaatgctgcaccgctggaactgcctaccaatagaccatgacgggctgccagcaaccgggtataataaaatccctctggatcactgatagtctcaatgctgtctggcataagactcttaaaaaagatcggcctctcttcaacgcctatcccctcgatcgcatgttcatgagcaggcccgccattcaagatcgatccctctggttccacagcaatcaaacgtatagtagaatctatcgactttaaatacgcacctgtcccggcgaaagtcccgccactccccactcctgctacaaaactgtcaattctctcaggaatttcttgaacgatttccggacctagtgttcgataataggcagccggattttgttcattttcaaactgtagcggcaaaaaagagtttggcaattgatcagcaagaaatttggctttcctgattgccccttgcatgccttcttgactaggcgagtgaatgattcgtgctcctaaggctttgattagttgttgcttttcttgactgaatgtatctggaatcacaaaaagcatgtctaatccatatgccaaaccggctaaagctaagccaatcccagtattgccagcggtgggttcaatcacggttgtgtctttcgttattcttccagcagcaactgcttctgagatcaaataactgcctaatcggtctttgatactacctccagggtttaagtattctaatttcgcatagatccggctttggctttctccgccgtagtcagtggctaaaaactgaaaaatcggtgtcttaccaattaattctttaatatctgatacgatcatgggtaaccttcttttcaatgaaatttttgttgtcagtccgctaaagtgctgcagcaaatcagaggcactgcgttttacaattggtcattcctaggtgatcacctgcttaaaaaggcatgatctgtctttgtttacagatctttgcaaggtaaatcaaagcaaacaaaaagaggcactgactattcaatcagtacctcttagagaatgactctaggactctttcccaacgaaagagactcttagagtaatttatccagatgagggaacgattaataggcatgacaaatcagtatgctgctttttagcaccatacaacaacaacataccaatgcaaagttgttgtttgtcatgtctacgtcccctcctttttaagcttgtaaacaaaatagcatgggaaaaaatagaagtcaatctttttttctttgtgaaaaatttttggtgacatatgcatcgacagcctgaaatgcatttgctacctcttctgctgtgatcttaaagggcattcgatggatcgtttcattagggagagtggcttgaataccgattgctagtaattcctgatcgttaagtgagtccatctgcatttctgctaacgttgttggtaaccccagagcttgatataaaacaatataacgttccaactcgtttgtatcttgttccaacagcaattgcatcaacgtcgtataggcaattttttctccgtgagaaagttggtggaacttcccagtagcggctgtcaacccattatggatcgcatgagctgctgctagtcctccactttcaaatcctagtccgctcaaaagtgtattcgcctccactacttgatcgaaagcggctgttacctgttgctgctgattggccttataggcagcgaccccattggcaaacagcactgcttcacatttctcagcaattgccatagctgctaaagtcggccgtcctcctacaagattctgagcgccgcttttagctactgctctggcttcaacatacgtcgccaatccatcggcgatgccgaaagttaataattttgcaggggccttggctaacagagttgtatcaaccaagaccagttctggattcttcggataataactatactgttcaaatttcccttctttcgaataaagaaccgagatggaggaggtaggggcatctgttgaggcaactgttggtacgacagcaaccgctcgcttcaaatgatgggccactgctttaccggtatcgatcacctttccgccaccaagagcaacaactgctgccgcttctgctctttctgcttcttttgcaatacgtctgatttctgcattggaggattcaccgctgaaatttgctaaggttacttcgattcctagatgggctaaatcgcttgccagttcttcgccagcaatcctccaaacaaatggatcggttattagtaataatttatctcctaatgagctaatatagtgcaagcctttttttaatacgttttctccttgaatgtagcgctgcggactaacaaatattttttccatgaactctcctactttcagttttttataccaattcccgacattgttaaaattttcacaaacgctagtaaaagcgcagcctgaaaaagtggttttcttcaggctccgctttttattttttcttaccaccaaaggcatctttcattttatcaaaaaatccttcaggttgttgctcattggttacatggccgcttgcttttgcataagcccgtaacgcttctttttgttcttcattcaaattctttggtgtgatcaacttaactttgacttgttggtcaccattgccattgccacgtaattttggtgcacctttgcctcttagacggaaattcgtgcccgtctgggtaccagcaggaatcttcaatttgacatttccgtgaacagtcggaacattgacctcgtcacctaaagctgcttgaacaaagttcaatggtaattcgtaataaatttcggatccatcacgatcgaagatatcactttcctcaacacggaaaacgacatacaggtctccataaggtccgccattgctgccagcttctccttgaccggataggcgcatttgttgaccatcttccacgccagcgggtacattgactttgacgctatgttttttcttttcgtgtcctgtgccatgacaagtcatacaaggttctttgatttctttccctgtaccgtgacatacatcacaggtttgacggctcatgacacgaccaagaggtgtttgacgttccacattgatcgtacctgagccatgacatttatgacaggtttcaggttgtgttcctggttttgcgccattaccgccacaagtatgacaggtttcttcgcggttatactgaatatttttttccacaccaaaaatcgcttcttcgaaagaaagatccacagcatattgcaaatcagctccttgtcgcggagcatttggatttgccgttctgccaccgccgccaaagaatgattcaaagatgtcttcaaatccaccaaagccgccaccggagaatcccccgccgttaaagccgccaaagccgccgccataaccaccaccgtagttcggatcagttcccgcgtgaccatattgatcgtaagcagctcgtttttgaggatcgctcagtatttcatatgcttcagaaatttctttgaattttgcttctgcatcaggttctttattgatgtctggatgatactttttggaaagcttccgatatgctttttttatttcgtcatccgaagcccctttttgtagacctaagacctcataataatctcttttgtctgccattggcttccctccactattttcttgcgtccctcgtattttagcatataatttgcttcagaaaaatacgtttcagaaattcataagaaaaagccaaagtggtgactttggctttttcacaaacagcgattatttatcgtcgccgtctacttcttcaaaatcggcgtctaccacatcgtctgcgccgccttgtgcagcttctggattttcttgtgcttgttgttgtgcagcttgctcatacaacttcactgtcaagttttgtacgatttcattcaatgcatcgcgttttgttttcatttcttcgatattgtttgcatcgacagcagctttcaactcatcacgagcttcttccgctttcttcacttcatcggcatctaccttgccttcaagctctttcaatgttttgtcaacagtgaatagtaatgcgtcgacatcattacgcaaatcaacttcttctttacgttgtttgtctgcttccgcatttgcttccgcatctttaaccatccgttcaatttcttcatcggttagaccagaagaagatttgatcgtgattttttgttctttttgagttcctaaatcttttgcagatacatttacgataccatttttatcaatatcaaatgttacttcgatttgtggaattcctcgaggtgctggtggaatttccgttaattggaatcttcctaatgtcttgttgtcagcagccattggacgttcgccttgtaggacatggatgtctacagcaggttgattgtctgcagctgttgagaagacttgtgacttgcttgttgggatcgtcgtattgcgatcaatcaacttcgtaaagacgccgcccattgtttcgatacccaatgataatggtgtgacatcaagtaaaacgacatctttcacatcaccagtgatcacgccaccttgaatcgcagcacccattgctactacttcatctgggttcactgatttgtttggttctttattggtttctttgcgaactgcttcgacgactgcaggaatccgagttgatccaccgactaagatcacttcatcgatttcagattgtgaaagaccagcatcttttagcgcttgacgtacaggaacttttgtccgttcgactaaatcagcggttaattcatcaaattttgcccgtgtcaatgtcatttctaagtgcaatggaccagcatcgccagctgtaataaatggcaagctgatttgtgtacttgtcacacctgaaaggtcttttttcgctttttcagcagcatctttcagacgttgcaatgccattttgtctttacctaaatcaatgccattttcttttttgaattctgcaaccatgtgatcgataatcttgttatcaaagtcatctccacctagattgttgtccccagcagtagacaacacatcgaatacgccatcccctaattcaaggatcgatacgtcaaatgtacccccaccaaggtcgaagactaggattttttcgtctttgtctgttttgtctaatccataagctaaagctgctgctgttggttcgttgacgattcgttctacttctaatccggcaattttaccagcatcttttgttgcttgacgttgtgcatcattgaagtaagcaggaacagtgataactgctttgtctactttttctcctagataatcttcagcaaatcctttgatatattgtaggaccattgcagagatttcttgaggagtgtatgatttcccttcaacttctactttatagccagcttcacccatatgacgtttgattgatgaaatcgtgttagggttcgtaactgcttgacgtttagcaacttcccctacttggatctcgccgtttttaaatgaaacaacagatggtgttgtacgatttccttctggattggtgatgatttttgcttcgccgccttctaggacagcaacagctgaattagttgtacctaagtcaataccgataattttactcataagtaatacgctccttttcattcatcgttctttttatttattgtgctacgataaccatacttgcacgcaagacacgatcatgcagcttatagcccttttgcaatactgtgacgatcgtatccgcaggcacatcttctgtcgcaggtacggtctgtaccgcttgatgaagattgggatcgaaagtttctccttcagcaggaatttcttcgattccttcttctttcaacgcttgacgcaaactttccaacaccatttcgacaccttttttcaagttagccgcttggtcttcttccacatttgctgccatagcgcgttccaaattatcgatcgctggcaataattttttgcccaaatcttgcgaacggtatttttgcaacaattcacgttcattacggtttcttgctgtaatattagcgatttcggcccgtgcgcgcagaaattggtcttctagttcattgtttttttcttttaaactgtcgatctcgcttttttctacttctgcttctgatagaccagctgcatcgatttcttcttctgacggttctgtcagaggctcttcagttgtctcaagatctttttctacctgttcttctttttctgacacttgctaccatcccttctataattcacttatttgatcattcactgtttgcatctagtgtgcgatagtaatcagccaatgtcattgctaattctcgacgaaaggcatccatcagtccaaacattcgcgaataaggcatactagaaggacctaataaagcaatcgtcccttggccatgaccttcaatgtcatagcttgcttgaatcaaactcatattttggagtaattcattccctagttcctgaccaatgcggatctgaatcgtggagtctctcggtgccaataattgtgtgagttcttctgcatttttcatgaaagagtacatcgacttaaactgacgaacatcttgacttggttcaaaatctaatagattcatccgtccgccgacgtaaattttctcttcaaagagatgactcaacatatcatcgaataaatcaatgattccttctgttgtttgaaaatacttgtgcaaaatcatcggaatctctgttcgcaatcgatgatagaccgtcatgagcggttcacccactaatttttcattgataatccgaaccatcttttctaaatcgctgctatccatcgatgaaggtaatgaaaaaatctgattttcaacattgcctttatccgtaacaatgatagcaataatttgtcgtgcattcaaaggtacgatccgaaagccagtcaatttccgttctttgacatccggtcctaacgataatgcggtatagctcgtaagattggataggatcgtagcagattgctgaatgatttcattgatttcatgaaattctttccccaaggaatggcgaattgctttgatctcattttgattgacttttgatggtcttaataagtgatcaacgtaatagcggtagccggccattgaaggaacacgtccagaagaggaatgtgtcttcaataagagacccgcttcttctaaggccttcatctcattgcggatggtagccgaacttgcttcaaccccatcctccatcaatcgtttggagcccgtaggctgaccagtatccgtataattttggatgatgaggtgtaaaatagtttgttgtcgttgtgtcaacatcttatccactcctccgttagcactctttcacattaagtgctaacacgattattaatataccatatttcctacgaatgtcaagaatttgacacagatttttagcactcttatagagagagtgctaatccacttcattgtcaattagctccaaaaaaagaagatcgaaaacagctcgatcttcttggttattcttaacttaataaaaatttttcaaatacatcattgccgataaacatcccagactttgttaaataaacgcggtctccttctgagactaaccagccatttttagaaagttcttcaacgacattgccatagatcgaatcaaaagaacaggcaaatttatttgaaaaggctgttttcgatacaccttgtttcttccgtaatccaagaaacatttcttcttccatttgattgctggtcgttaacgattctgtttcatggatcggcagttgatcttccctcaatggacgcagatagtgctggatcggtccaaagtttttgtatctcgtctgtccgatataaccactcgctcctgcgccaaatccgtaataatgttcattattccaataaacaagattgtgcttagactcatatcctggccgggaaaaattactgatctcatattgcgataagccagctttagccattgcagtgatggcttcttcaaacatttgtgtctcagattcctgagaaggcaactccattttcccttgcctaacccaattcatgaacatcgttttattctctaaaatcagtgaatacatagcatagtgaggcaaacccaaatcaatcgctcgtgttagcgtatctcgaaaactttccatcgtttgtccaggtaaagcataaatcagatcgatcgtaatattttgaaaatcatgtttatctaacaaccgaatcgtttgatagacatcctctgccgtgtgcttgcggccgattttctttaacaagcggttatcaaaagtctgcacccccatcgacaaccgatcaatgcccagatttttcaaaactagcaatttatcttccgttaaatccccaggattggcctctaccgtaaattctttggtcgtttgcgtgggcagtaattcatgtatgcctgtaatcagaaggtctagctgcgcagccgaaagggaagtcggcgttccgccgccaatataaatcgtctcacaagtagtgattggttgtttgctcaccgttagagcgatttctttcagcaaacactcgatgtattcatcaaccggttgcccttctaaaaaaactttattaaagtcacagtaataacaaatatgttcacagaatgggatgtgaatataggcagaagtactggtgggaagtgtattgattggaatcttattcatggtttgcatatttttattcctttcagagatcaaatcaacgttcaactgcacaaatacggctcgcagcaaatgaacctgatccgaggtatatccgctccccattctatcataagtaagattatctcgaaacgcctctgctttaaaagtagttagaagcagatctcactgctatccgttaataagaatacaatcgcatgcgcaaaattttaaaatcttcaccgataaatgggaaataggcttcatccccattcaggcgacgatttgtccgccattgcccatcttgtagacccccctcttctaaagaaaggatacctaaaggattagaaccctgctgcgcttgcagatccaatgcgaaattagcaccggtgagatagtaatattctttgtgtttaatgatcagacctgcggaattgatcattctgtctcgagaaaataatttgactgcccagcgatcctgtccattttcatacacaatttggttctgagccccttcttttttaaatgagaagatttgagcttcctgatcttgcaacagtggctcaagggcggcgatgattcgatacccttggtttaaatgaggcagtgtatcggaagaatcaaaggcgtctttcgctaatcctaactgggataaaaagcggtaatcctgactagtatcatccgttagaagatcttcgataccaaaaggtgaatagccgattgctccttgaccaaaagcataaaatagattcgaaatatatcttttgtcaattcgggtttccggaattaacaacggctgatcattcccgtattccgcgatgatcggtttgatttcttcttcgtaaatatctggggcaataaaatccaactgagaggcaataactttccaaacttgccaagtggtggatacagcgccaccactaggatattctcccggccgcctgtctggctttttgagccatacattcgtaaataacggcaacgctaaacgttttcttgcaatctttgcatagtcttggatttctgcggcataatgatatgccataaacacttcatccccaaagggtacttctgaccattgtttagctccgggatagaggtttctgatttcttgcggcaacgccatctgatagactttttctgctgctgacgaatgatcacgactagtgccaagactaccaatctcgttttcaatctgcaccattctgataaaggcccgcaaaggatggcttcccaagtagtcgcagatggcggcaaaggctgaatgagcctgtgctatcacatcttgacatagcggactataactattcatcttgtttccggcgctatcctctatgcgaaaatatttgggatccgttttgatccattcaggaacatacgtggataagccattcttccaaaggccaaaccacaaaaaaatcacatcgattttcttctcagcggcattttccaaatgggaatcaattaatgaaaaatcaaactgattaggctgtggttcgatcagctcccaataaataggtatcaaaagggtattgatcgcaaccttgtcaatcttgtcccatactttttcctccatgtaagcgatagaggaagcagtggagttatggacttctcctcctagtatcaatttttgagaatgctgtcgttgtttcatcattgtcctcctttttcttctcagacagatagtcacgttttgatcgactatccctctcaggtagttgcaagcgtttttagtcgtaattctattataggaatcttctaaaataaggtatactaaaaaaagagaaatcatactaaaaaaacagaaatgaggtttttgatgaatcgagaagcactagaatcaattgtgaagaaactctacgataaatatttgattcctttatttatcttcgatgaaaaacagcaagtggtgattcctcgtaattccttcataactgataaacaagtggcggaacattttttccttaccagccaatcgactgaattggatgtggtgatgttttttgaaggagatgacttttttttcagcagctttacttgtgatctaccagattcttcaattggcaatgtgctgattggaccttgcgggatattaggtactaacaaaagatcatttccttttcaaggatatgattacattgctggggtccattactcgaaagaaagtcgagaatcttttgtcgctttcgttgaattgttttacacgatcctaaaaggagccatccctgatgccaacaagtttcgttggagcgttccagagaaacaagcaaattccaatacgtccaccctattagaagaaaatctttatcaacgacggttagaggatccttatttggactcgtttgaatttgagaaacgttacgtagaggctgtacgccgaaatcaacccgaaaaaattttttggctattccataaaatgagcagcacctacagcgtcgaactagcaaacaacaagctagaaagtttgaaatacaagtattcaggattgattaccattctaactcgggtcagtatcaatgaaggcgttccggtgagtctagcctatgggttatccgatacactactccaaaaactacaaaatatttatgacgttcaggaatgtttgacccatattcaggaaagtacttatcatttcatgaggttgattcatgcatttcctacccagaaaagttttttgatcagaagtctcatcaattacattgatacgcatatttacgataaaattacattaaacgatttggctgaatttactgaaaaacaccccacccatctgagcacagaattcaaaaaacatgtaggccaaacgatccacacctatatcaatcagcagaaagtagcggaagcaaagcatttgttagtgtttactgattatagctataaagaaatagctgcattgcttcatttttcgaatcaaagccactttatccaagtattcaagcaatttgcgatcatttctcctaaagaatatcgcaaaaactatttctcaagtgtcttttgttcaactgatagttgatggatcaacttataaactctctctaaacaaggttgttaaccgtctttttctgccctccataaaaaaaggagtggatttctccactccttaaaagactcatgttttgggttaactactgctcacagtaattttttgctaacaacgacttatttaactaggtctgaccttcgcatgctatagtgagaaaaaaagctcttcaggctatacgttttcctatcattgaataaacatccgcaagagcgaaatcagataacgaatcaatcgatagatcaaaaacaagaaaaacaggttacctaaaataaagcggaagccatttccaatggaggcacgaaacgagcggaaactaaagtaacgggaccatttgctaaaagtagtttgtccatttcttctaatgcgataggcttcatcataagtattctccaacatatcatagtaaaagataaaaagaggttgtttagggaaaaatgcttttttgaatcctgccatcaacgtgtacgttttattagcagacggaaaattccgattgccgtttttcttgattcgcacttgctgcccgtttttatttttggcagcataataatcttcaaattctacgatttgataaatgatcggttcgctattttcttgttcaaattcagcaattatttgatcgacttcttgccaacgtagataaagccaagcaaacaacacgagcaaaacagcaatcaaaaacaaatttagtagaaatccctcttggatcagcgctagataagcacaaataatcaaaagagcgattccaacaacaatcattcttcgttggaaataactgcgatacatttgttcaaaagatcgccgataataggcaaagtcatcttttacaaaattcatgatcgtcccactttctgaaaagattatttggttcaatttatcaatatcttgtgaaaatgtcaatttatctctcgagtgatcttttttttatttaaatagaatcatttctcttgacttcttataggctactcgggttaaagtaatagataggaaaacgcttttaaaaaaatagaaagttgggaaactatgagtctactgaatgaaacattcacactgaagaatcaaatcaaaatacctaagatcggattgggcacttggcagtcctctccggaagatgcctatcatgcgacaaaatttgctcttgaaaacggctatcgtcatgtggatactgctgctacctataaaaacgaagcggctgtgggcaaagccctccgagattctggtgttcctcgagaagagatattcgttacgacaaaaattcctgctgaactgaagtcttttcaagaagctgtcgatagcatcaaacgctcaatggcagagcttgacactgagtatatcgatcttgttttgatccatgctccacgaccttggaaaatcatgcgggataatccggagcaaaaaaaatatttcgaagaaaacattgatgtctggaaagcactggaagaagcgtatcaaagtggtttgatcaaatcgattggtgtttccaattttgaccaagatgacctgcaaaatatttttgaccattgcgatgtgaaaccaatggtcaatcaaatcatttatcatattggaaaaacaaatgaagagttgctgcaattctgtaaagacaacgaccttttagtggaaggttattcaccaatcgcgactggtcgcttgctggataatgccgacatcaagaaaattgccgagaactatcaacgctcgatccctcaattatctattcgttatctattgcaaaaggacattttaccattgccaaaatccgttcacgaagaatatattttggataatgcaaaagttgattttaccatttccgatgaagatatggcctttttagatcaactctaaacgtccctaacgcaaaaaatcgctcacctgcaaaatgatcaacttgcaggtgagcctttttacggttgttttatactaattgttcaaaggttccccagactttcacgtcttttttatcgaccatcacttttcctttagcgatcaccgtttcaacatctagcgtatcttgattcaacaggcaaagatcggcatccattccaggagcgatccggcctttttgagccaacttcaaaatctttgctggattagaagtaattgcacgcaatgcaatctccaaaggaatctgttctacttgtacagcttctttgattcctaccattaaagctcgggaactgcctaccccaagcccaatgaattgattgttttcatcaaagtaaggcagacttccttgaccatccgatgtcatggtgaattgatccaacccgataccttcgtctaacaaacgttttagccctttactaaagcgaacttcatcattttctctttcccaaaaatcaggatcttcacttgcggtaaaatcgatggtaccgcccattttagcaaaagcgatacttgcttcaaacaactcacttgtccgatttgcatgagtcggtaaaaattgactaatagggatctcagtctcctccacagtttgtagcaagagttcgtattgtcgcttgccaccacctaaatgcacattgatgatccctgcttttcctgagagcatgccccctactcgagcatctgctacagcacgagtaaattcttcaaaactaggttgtgaagaacggtgatctgagaccgcaatttcaccaatgccaatcactttgtcgatcgtcaaaaagtccttgatcaatgaatccgtcactggatcaagaggcaatcgatacgaaccgtcatagacataagtcgagattccttccgcttctaaacctttggctttgctgatcaatgccaccatatcacgcccaacaccatcggttcctaaacagccgacaaccgttgtgactccagcagttgtcagctggctaagggttacttcaggcgttcggttctggtagcccccttccccgccaccacctaagatatggaaatggcaatcgatgaatcctggtgtcgcaatcaatgaagaaccatcgatttcttcgacagttagttgatcaaagccgccactgatttgatcttcgatggcaacaattttgtcattgatcactaaaatatctttctttcctaaatattctggtgcataaacttccgcttgacgaataagtttcattctcgcagctcctctcttattgcagaccaatcgctacagcgataaagataaagatcgtacctaacacaaacagaaatccttgcattttaatttggaacttcgcccattttgcccattcgattcgcgcaacgccaagcacaccgatcaaactggcagatactggagtgaatgcatccatgaatccggaacctaattgataagctaaaacggcgatctgtctggaaccacccacaagatcagctaatggcgccatgatcggcattgtcaatgctgcttgacctgagttcgaagtaacaactaaattaaataagctttggaaaatatacatgaaccaagcaccgataaaggctggcacaccgcttagcaatccgccgatgctgtgtaggatcgtattcaacgctgaaggcacattggcatcagaaccacctagaacaagcaggattccttttgccatcccaacaacaatcgctgttccggccaaatcagctgcacctgattgaaaagcacttgctacatcgttcaagcccatgtcttctaacttaaagatcacagcaatcaggcctgcacctaagcccatcacgaagaactgtgaagcaatttctggaatatagtaccctttttgtgttactccccagacgatccaaatcaaaactgccagcatttcaagcaaaatcagtttatgccccaaaagaaacggcttgttttcatcagatgtcttctggatatggtcgcggaaataggcatccgatttgtaagtcaatgatttctccggattcttacgaatacgttctgcatacaccatcaaatatgcagctgataagccagtaatgactacccacatgataattcggaaagttgcccctgaaagaactgggatacccgcgatcccttgcgcaaccgccacactaaacggactcatccaagaagttgcatttccgatttgcgaggccacataggtgaccgttaccgccacgatcgaatcatacccaagtgcgatcacaaatggcaccatgaccatagaaaaaggaattacttcttccgccatcccaaaagttgctcctccaaatgaaaaagcaaagaataaaagcggtaaagccaatcgttctaatcctcgtgtcttactgataaaggcaaaaatcccagcatcaatcgctccggtcttcataatgatcccaaatgcgccaccgactactaagatcaacgcagcgatcccgacagcggaaccatatttatctcctgaaaccaatccttcaaacacaaagttcaagaaaccaaaaccgccaaaatcatctgttccccaaacctttgctgtcttatgaagtttttctgatgtatcatagattttatctccatataactcataaagaacatcatccgttagggagagctcatcgagcttttcttgatcaagtttcgactccccttcgtctagcacactttgcagtgctgcttgatcgacacccaattcttctagctctgctggattttcttctaaattctctaactgctcgaagacaaaatcggtattaagcggatacgcataacggaatgaatcttgtttcaaaaccgttcgcgtgctcacttcaccatttgcatcaacatattcaatctcttccgtactgaattttccggcaggaatcagaaatgtcaatacccatgctaccagcactacgccaaaaatgatcacatacgtgtgtggcgttttcatttttgttaaatcttttttctttttcaccaattttctccctttcaccttatacattgactgcataaattatcatttcccatcttttttagtatagcggaattttgccctttactcattgggaaaccattagaatttgttgtaaattctagcgaaataagctaggagaacactgatgtaccaaacaagtaatagacaagaaaaagtcttcaagacagtaaaatatcttgaagacttttaggtgatgcatcttctatttattcacacgttttgcgatcattggtaaaatcagtccaatcaagataaagatgatcggtgtgatgatattcaatgacaattggaacaaccaagcttttggatcagcagcataatctaattttggtaccatccctaagatacaagcaaatgctgtaaataagaaacaccacaaaccaataccaaagcctagttttgtatttttaacaaacttataatctgatgagaatcgatgggcttgtttattgatcagcatgaaggctacaaatacccataagtaacgtaatggcatcacaaccgaattcaagttcaacaaccagcgatacaattcagtcatatttccgatacctaacgcaggaatgatgatcaagatgctgactaagatccctgtcatgatatatccattgatcggtgtaccttttttgttcaattttgccaaaccatttggtacaaattctggatctgcatcagaaagcaaaattttcaacggcgcatcaatagaaaatgctaatgctgaaatttgcgctaatgcattggcgatcgaataaagaatcacaaatgtattgccaatcccatagaaattgccaagacgttggaatgcttcataagcgccatttaccatcaaatctttaggaatattgtttgcatcgaacagcatccccattgcgattgatcctagtaacgcacataaagcgaccattccggctaaaaagatcattcctttaggaaattctttggcagggtttttcgtgttattaacgtaaggcgaaattttttcacagccacctaccgcaaacaccagcatcgaaatcgtcgttaagtaagtaaaatcgaatttaggaatataagttgaaacagttgtcatatttggtgttgctacttgagctccagtcatcgctggtgctgttactgctaaaataataaataagatcgacatgacaaacatcgctgttccggcaatattaccgatcatcttcaatgtagtcaatcctttagatgcgatccataaaaagaaaagaaaaatagctaaacaaattaatgagacttccattgatccgacagtcgatacgaaagagccgtttcctttaaataaccaactcaatgataccaggatcccttgtggtttttgtgcgagatatgggacgtgaacgacccagtaagtccaagcagcgaaaaaggccaatcgtttggttgaagtttctttgatccaagaggatacaccaccgcttgattccttgaacgttgatcctagttgacctacactcaatgcgtagggaacaaagtataatgccatgatcaagatccaagatacaacaacagtcaatccctgttgtgcatagttgttcactacatttccgagtccccaaacagagacaaacgccattagcgcaatattataccagcgcaattgtttctcgttcattactttctcctttaaacatatgatttcagtgatcgaaccgaattctcgaatgatcatgatttccatgtatcgagcaaagtttatttgtaagtcgaatgagctgtccacaacgctttttcacttctaacgaacttctcgataactgtcattaacattgaccagaaatggaatagaatatcattttttttgaccattcatttcgtttcagtcatcacctcattttagaataaacccctaaattattttggtcaagagaaaataataacaattttcatcgttttttaacaatgggttaagcgatatataaataacgagataaaaaccattatttagattaaaataactcctattgcgttccgttcctttactggaaattagcacctaaacaaattttttagaaaaaagataaaacagaattttggaatttttcagacttttaactattaatgattagaaaaataattttattcacgcaagatattcccttacaccactcttcccgctaaacaaagtgaacagtaatagaaaaaaaccaacttatattttgtctagactacaataaaaacgataacattcgtcataaaactattttaactattatttaaaataacaaaaaatcttaattagatcagtttgattgacactttccgatcctcttaagattttttacgagtactaaaggtagctcttatttatcgaagtatttcctagtatcaatctcgtcttgttgcagttgttcaatcaaggcttctgcgccactaaaagcaacttgatctctcaaaaagtggtgccagcgaatcgcaacagtctctccatagatatcttgatggaaatctaaaatatagatctccactgttaattgtcggccttgaccaaaggtatcattatgaccaatcgatcccatagacggataccagcgatcacctactttaagctcggtaacatagacaccttcttttggcaggcgcactgtacttttgactttaatattcgctgtcggaaagccaagttcgcgtcccctggcatcgccatgtacgacagttccttcaaactcataaggataacctaacagtcgattggcttctgccatttctccgttctgcaaagcggcgcggattcttgttgagctgactttctcccctgccaaagtttccttgggaacggtaatcacttcaaaacggccttgggcataagaaggtaaaagtgccatgtttgctgtctctttctttccataggtataatcgaatccagccacgaccacttccgcatgtaaacctaccatgtattgatcgacaaagacttgcggcgctaaatttgcaaaagctgaagtgaaatccacttcgtaaagatagtcgactcctaaatcagccatatgggcttctttttgtgataagctggttagatattgcattgcctcaggatccactttttgaaagacaatagatggatgctgattgaatgtcatcaatgccagcttcaatcctttttcttttgctgctgcttttcctgtttcaataactttttgatgacctagatgcacaccgtcaaaaaagcctagaaccaaaacgacaggttctgatggaatgacatctttattatatggatgacgtagctcgataatttccattcttactctcctatttctgtacgaataactttcgcaggttttaatagcccctgtttcctttgatgcggcatatagatactaacgactttatcttgataaaacaatgccacaggtgttgcaggaggttcttgaagaccaaaactatgatatggcaagggcatgccattcttgacattctgccacaacttctcatcaattgcaattttgggaaacccgcttaccccatattcaatgggctgcagcaactcattgattcgccctgattccaatgcttcacgaacttctgcaagcgtaacagattgatctttggtaaagccgccgcttgctaaccgtgtcaagtcagacatatgagaggctactcccaaagcagcacccgtatcgacggctaacgtacggacatacgttcctttcccacagcttacttgaaaccgccacgattgggtgccacttgtctcatcaaagattagatcgctgatccgcttaaatgaatgaatcaaagcttgccgttttggacgctgcacttcttcatttgcccgggcatattcatacaaacgtttcccattgactttaactgcggaatacattggcggaatttgggtaatttcaccagtcaaacttgccattgcacgatcgacttctgctgtagtaaaaggttttgctaaaggcgtcctttcaacaacttcacccgaacggtcttcggtcgttgtggaaaaacctagcgtgatttctcctgtatatatctttccggaatccaccaagtattccacgactttggttcctttgccaatgcagatcggcaatacaccgtctacatcaggatccagggttccactgtgtccgaccttttttgtatgtaaaatttttcgtagtttaaagacacagtcgtgactggtttgaccacggtctttccataatggcaaaattccatccatagtatccctccgcttctttttcaacttgaccattataccatattctaaaaaaacttagtatggtcttaaagtctttcagaatgatattcgttcatgatacacttatattataaggaggtgccacatgattgtattcgtttgttcattgattggtttcatactttttttatatttggttcaacgtggtacgctgcaacaacaagaggaggcactggctttatttgttatcaagagccgaacacctgctttaacacggatgatgctcttttttacaaatttcggtaaagcattgcccacgatcatcttattgttattgctttatgtttttccagctacacaaactatcctagcgccgaaagcagcagcgagtgtcttacttgtctctgcattcgcttatctgattaaacggatcgtccgcagagaacgaccaaacgatcatcggttagtcgaagaaaaagaccacagcttccctagtgcccatgctgctacttctgccgcactttatggaactgcagcgatgaatatggcttttcttttgccacctgctgttctgcccatgagcattcttgcggtcctgctcagttttatgattgggttcagtcgcgtttatttagggatccattttttgacagatgttatcggtgggtggtttttaggattagcagttgctgcattgatcaccattttgttatgatttttggccttgcacagtatctgtttgatcattatagaatagcctcacctctcagtaataaaaaaaaggccgcgtatatgaagcgacccccaaaagttagaccaaaaaatctaacttttgggggtcgttatttgtatggcaaaatatccttttgaattaaaactaaaaatcgttaaagaatatcttagtgacgtgggcggatatcggtatcttgccaacaaatacggtatttcaagcaagtctcaagtaagtaattgggtgaatgtctatcgtgaatacggagaggaaggtctattgagaaagcatcaaaatcagaaatattctgttcaatttaagttaaatgcgctagagttatatcaaacaagtgagatgtcctatcgagaagttgctagcactttagaaatgaacaaccctgcgcttattgccaattggatgcgtaatttcagagaagcaggtattgaggggctctcaaaagagaaagggcgaccacttactttgactagaaaaaaagaaaacaaaaaagaaaaatacaacaactgaagaacgcgatcgtatcaaggcattagaaaagcaagtccgatcccttcaaattgagaatgcctttttaaaagagttgaggaagctgcgaaaacaggaagcccagcaaagacgcaagaatcaatcgcacgaatcatcgccagcctccgaggatcattcaaactagttgagcttcttgaaacattgaaatttcctaaagcaacctatatgtattggcagaaacggtttgacagaccaaacccagaccaagaaattgaagaaaaaatgcttgaaattcgcaaagatcataaagattacggctgtctgcgactaaaaaaagaattagagaatcaagggattcatgtcaataaaaagaagattcaacgtctgataaaaaaactaggtatcgaagtaaagtcttacactcgaaaatctcgacggtacaattcttatcgtgggaaggttggcactgtcgccaaaaatcgtattcatcgtcggttttatacaaatatctgtcaccaaaaaattacaactgataccacagagtttaagtattatgaagtagacaccacaggtgtcgttcgtcagaaaaagctgtatttagatcctttcatggatttctacaatagtgaaattctatcttatcggatttctgaaaaaccaaacgcactagccataatggaaggattagaagaagcaatccagatgacaaatgattgtccatttcgtagaaccttccattcagatcaaggatgggcctctatcaaatgaatgcttataagaataaattgaagcagcataaaatcttccagagtatgtctcgtaaagggaattgtttagataactcacctatggaaaacttctttggtttattaaagcaagagatttttcacggagaagtctatcggagtttagatgaattgaaaacaaaaattgaccaatatatctattattacaaccataaacgcatcaaaaagaaattaaattggcgaagtccggttcagtttcgagaagctgtaaaaacagctgtctaacagttaatcttatcatacaaaaaaggagtggatttctccactccataaaagtctaactttttggggtcactacatatacgcggcctttttttatgtgattctttattcgcctttatgcaaatcgcgaatcatttcatcgatcttatttccatattgaacagattcatctagttcaaattgcaactccggaactttatataatgacagtgcctgtcccaattcacgacggactaaccctgttgctttctctaatccggcttgtgctttttgcttttcagatgcaagatcactcaaagtgctgtagaaaatcgttgcttgctgcaagtcccctgtcacgcgaacatctgtgatggtaacatcttgaacacgaggatcacggactttcttacgaagtatttgattcacttcttttaagatttcttgggcaactctacggtcacgataattagccattcaaaaaacctccctgataactagtgtcttaattcattggtacttcttccattacgtagccttcaatcacatcatctactttgacatcattgaatttctcgatcatggcaccacattcaaagcctagttttacttctttcacgtcatctttgaaacgtttcaaactagctaattttccttcatagatcacgatgccgtcacggattacccgcacaccgctgtcacggcgaatgctgccttccgttacataacaaccggcgatcgtaccaactttagaaactttgtaggtttcacgaacgatcatttgaccagtgattttttcctcaaattcaggatcaagcatccctttcatcgctgtttcgatttcttcgatagctttgtaaatgattcggtgtaaacgaatatcgacttcttcggcttcggcttgttgtttagcttgcggagttggccgcacattgaaaccaataatgatcgcgttacttgctgctgcaagtgtcacgtcactttcattgactgctccaactgctgaatggacaatattgacccgaacgccttctacatcgattttcttcaatgaagcacccaacgcttcagcagaaccttgaacatccgctttaatgattacattgacttcttttaattcgccttcttttaggctttcaaacagattgtcaagcgttacccggctgctggaagcgcgttgttccatcacggcgcgtttcgcccgttcttcccctgctgcacgagctgtcttttcgtcttcaaatgtaacgaatcgatcacccgcttgcggcacatcattcaatccggtaatttcaactggtgtagctggtcccgctgttttgtcccgacggcctaaatcgttggtcatcacacgaactcgaccgaatgtgttcccgacgacgataggatcacctacatgtaacgttccttgctgtaccaataaggtagcaaccggaccttttcctttatccagacgagcttcgatcactgtaccgatcgcccgttgtgatggatctgctttcaaatcttctacttcagcaacaagtaaaatcatttccagcaattcttcaatattttgaccaaatttagcagagatttctacaaagatggtatcgccaccccaggcttctggaatcaattcatattcacttaattcttgcatgacatgttgcgggttcgcacctggtttatcgattttgttaaccgcaacgatgattggtacttttgctgctttagcatggttgattgcttcgacagtttgtggcattacaccgtcatctgctgctacaactaaaatcgtaatatcagtgatacttgctccccgtgcccgcatacttgtgaaggccgcgtgtccaggagtatccaagaaagtaattggtttgccatcgatatcgatttgataagcaccgatatgctgcgtgatcccaccagcttctccgcttgtcacacgagaatggcgcaatgtgtctaataacgttgttttcccgtggtcaacgtgtcccatgatggtaactaccggcggacgagaaacaagattttctttgttttgttcttctggttcaaagaatttatcgatatccgcgatgtcgatttgaactttttcttgtggttcaataccgtaatcagttgctaacaattcgatcgtatctttatccaatggttggttttgattgaccataactcccatcataaacaacttcttgatgatctcagcaggttcacgatagatttttttcgcgatatccgctacattcatgccttctgtatattccaatacttctggtaattcacggaatttacgtgctggaacaggtggttttttctcttgctgttgacgaccttttttcccttttttgttaaacttgttgcggttattgttattgaaattattgttgcgtccgttgtagtttgacttaccacggttttgatttccaccgcgattttggttatcaccagctggacggctttgtgttccttgactgctagccccttggtttggacgactttgttgtccttgtgctgggcgattttgactttgatttccttggttcggatgattttgttgtccctgtgctgggcgattttgttgcccttgaccgctaggacgattttgttgtccttgtgttctattttggttcgttggacgattttgttgtccttgattgttacgattttcttggttattcactcgattttgacttccttggttatttggtcgattacttccttgatttgttgatccgttgttttgacttgttgggcggttgggttgtccttgaccattaggacgagaattcgtcgtgttccgctgcccttgattattgtgtcggttctggaagttaggattatttctctgcgttttaaatttcttttgctcttgtttttccggctggttggctggtttctgatttgcgggagttggttttgctgatgatcgatcatttggattgccgcctaatgactgccgcaatttttgcgcctctccatctgagatcgcgcccatgtgatttttcacatcaaagcctaaagattgtgctttttcaacaacctctttgctcgatttgttccattcttttgcaagttcataaattcttttttttcccatgcaatcaccttcctaacctaatattaattcctgcaccttctttgcaaatcctgcatctagaatgcccaccaccattcgcggtttgccaatggctgaactgatttcatcggcagaaaatgtatctaggagcggaatttcataataagaacttttgtcctttattttcttttgtgtatttttaccagcgtcactagcgacaagtacgagagctgctcgttgttgacgaatctcttttaacgtcatctcttcgccagtgatcaatttcccagcacgcatggctagtcctaacatattcaatgctttttgtttattcatttgcaaataactctcttcgggctttttgatgcgtcacatagtctaagagttcttgataaaattcatctgacaatttcgtctctaatactctatccaagatccgcttatcccaagctaattgcgcttcctctggttcgatagcgatgtacgctcctcgacccggcatcttgccggatggatcgatcgcaacggttccttctttcgaacgggtgatgcgcagcatttcttttttgggaatcatttcccctgaaacaacagattttcgtaaaggaatttttcgttttttcatcgcgatctctccttgacttatttttcgtcaaaatccatgttttcgtaatcgtctgccgtcatatcagaagcaatgatcatttcgtcgtgagactcattatcttcgatagtgctttcttgactttcaacagcctcgccttcatcgatataggcgccttcttctaattttgcataaaattcttccatgtctgactccgatttgatatcgatcttaaagccagtcaatttcgcagccaaacgggcattttgtcctcgtttaccaatggcaagcgatagctgataatcaggtacgaccaccgtacaagctttcggattatccacatcaaaaataacatcagtcacttctgctggattcaatgcatttgcaataaataccgctggatcatcattccactcaacaatatccatgttctcaccttttaattcattgacaattgcttgaacccgttgtccctttggaccaacacaagttccgacaggatcgacattagcatcaaatgagcgcacagctactttagagcggtctcctgcttctctggcaatgctgacgatttcaactgtaccatcataaacttccggtacttcttgttcaaataaacggcgtaataaatcaggatgactacggcttacaaaaacttgaggccctttcgaagtattttcgacccgagaaacaaatactttgatccgatcgtgaggttgatagaattcatttggcatttgatcttgttttgataatactgcttcgatttttccaaggttcacatagatatagcgattgtcctgacgttcaacgatcccttgcaggatatctttttcataggcactgaattcattgtagatgattgtccgttctgcctcgcgcacccgttgcaaaatgacctgttttgctgtttgagcagctatccggccaaaatctttcggggtcacttcgaaacggatcttatcgccaatctcgtaagcaggattgatcgtcatggcttctttcaaagacacttccaattgagagtccattacttcttcggtcacttctttgactgcataaacgtgaatattgccttttttctggtcaaattcaacttctacattttgcgcttgaccataatgacgtttgtacgctgacactaacgcggcttccaatgcgtcaatgacgatctcttttgaaatgcctttttctgcttccaatgcatcaagtgcatttaacatttctttactcatgattcttccattcctccatgtttaaaattggattgctaaacgagctttggcaatatttttccgttcgatcgttagttctttttctcttgttttgattcgaatcttaatgactagttgttcttcatcaaaggactgcaaaaagccttcaaattgcttttcgccttccaccggctgatacaaggaaagatggatatattctccaactgcacggtgatagtcctcttcttttttgagggggcgttcagcaccaggcgaggatacctctaagaaataggcttgtgggatcggatctggatcacaggcatccaatttatcactcagttgttcactgacaaaggcacattcttcaatatcgattccgccctctttgtcaataaacacccttagaaaccagctttttccttccttaacaaattctacctcaactaattcaaaattttgcgcttccagaatgggggtcacaattgttgtgacagtttccaccactgtactcacacgacatcgcctcctttatttctcaacgaaacgaacttcattccattaaaaagagtgagcgaaaaaaccgctcactcactctaagtatcattactatgtaaatataacatagtttactaacaaattcaagtatcctagcattttgtggctttttctgaaaattttacatcctatttcttaagatttcttccttcagaatacttccttgttccctctatctcaaaataggcagctgtctttcttgattcaagcaatgaaggcgacaagcttcgtgatgacttgtggaagcaaagctttcggatcaaagtccatcggcgcttgatcaggaaaaaagtgccacatgcggtagccataaacgcccagaacagcaatcatcagtccaagccaaaagtagcgattttgattgatacgctgaaccatgggctttttccagaaaatgacaagtaacactagcaaaggaatgagccaaaaaagtggatgaaaataaaaagcgccttgtatgtcaccttcaaaaagatgcaaataggcgcgagtcattccacatccagggcaaggaacccccgtcagcagtttaaacggacacattaataatcggtccaatcatcagtgtcttgagtaactgattggcttgcaaaatctgcagactcccacacttgattcatatccgattgtaaaatggccatattgataatgtccaaaccaaaaatcgctaagacaacaaacaacactttattatcattgatacgtggaaatttcgttttttcctgtgcagtgataaaaatgtccgcgattcgataccaccaataaatttggtacaacccgcaagtaatgatcgtcaacaacacagacatgcctggggtaaggcgataatcttcactatattctgtcaaatcttgcgtggtttggtatagccagaaaagtgaatagatgccgcaagtaataatagttagtaaaatcaccattaaaatggactttttcttggattgataattttgatacatcggttactccttctaaaagattgaatctttttacttttcttccaattatacaccaatccaaaaaagtggaaagtccttttaaaggaaatttatttcaataataatgaaaaaaaaggatgtaatctaagctttttaataaacgaaacctctgaaggacattgggatgctgttaatctccaactagtcaccagtaataacgccagctggacaaacactttttttccactgtcattcggatagtctcattttttgcttctattacaaaccttttattacaatccttttattataatccttttaattgatttatgcgcgactataattttttacttctgctgccattgcatcaacaaagatatttagttcttcaacgttcgtttctttgctgccgtaacgacgaatattgacagttgcatctttgacttcttggtctccgacaactaactgataaggaattttttgcatttgtgatgcgcgaattttgtagcccattttttcattgcgatcgtccacttccacacgtaaaccttgtgattgaagacgttctttgatctcataagcataatcgctgtgtgcatcgactgaaacaggaatgatcgttgcttggatcggtgccaaccaagttggaaatgcgcctttgtaaacttctgttaagtaggcaacgaaacgttccattgttgaaacgatcccgcgatggatcacgactggacgatgtgtattttcaccatcttcaccaacataagttaagtcgaaacgttctggtaataagaaatctaattggatcgtggaaagcgtttcttccatgcccaaagcagtttttacttgaacgtctaattttggaccatagaacgctgcttccccttctgcttcgaaataatccaaattcaattcatccatcgctgctttcagcatggtttgggcattttcccacatcgcatcatcatcaaagtatttatctttgttttctggatcacgatagcttaaacggaagcggtaatctgttacattgaaatctttatagacttcaaccatcaaatccaaagtccgtttgaattcatctttgatttgatcaggacgaacaaatgtatgtccatcatttagagtcatttcccgaacccgttgcaacccagaaagagcgccagatttttcgtaacggtgcatcatccctaattcagcgattcgaatcggcaattcacgataagagtgaatatcgtttttgtagaccatcatatgatgagggcaattcattggacgaagaacgagcatttccccatctcccatgtccattggcggaaacatatcttcatgataatgatcccagtgtcctgaagtcttataaaggtcaacattggccatgattggtgtataaacgtgttggtaacccaagcttacttctttgtccacgatgtagcgctcaatggtacgacgaatggttgcaccttttggcaaccaaaatggtagaccagcaccaacttctggagagagcatgaataagtctaactctttccctagcttgcggtgatcccgctctttggcttcttctcgtaaacgaatgaattctttcaactcttttttgtcaaagaacgctgttccatagacccgttgcatcatttggttatttgaatttccacgccagtaagctcctgccacagataaaagtttgaacacttgaatccgtcctgttgatggcacgtgaggcccgcgacatagatcaacaaactctccttgttgataggcagtaatcgtttcatcttctggtagttcactgatcaattctactttatatggatcttcagcaaatagttctaaagcttcttttttcgataatacacgacgttcgatcggtagattttctttaacgattttcatcatttctgcttcaattgctggtaaatcttcggcagttacagggctttctccattatctgtatcataatagaatcctgtatcgatagctggtcccacgccaaaatgaatgtttggataaaggcgacgcatcgcctgagccattaagtgagctgctgaatggcgaaccaagcctaaagcatcctcatgatccggtgtgacgatttcgatttgtgcatcctcttcaatccctcgatcaagatcaatcaactgaccattgacctttcctgctaaggcttttttcgctaaacttttagagattccttcagcaatttcttttgttgtgatgccaactgcaaattcttttttcgccccatctgggaatgtaattgttagtgtcatttgttttccccctactgatttatttgatcaatgaatgattcgaaccaaaaaaagtcctagtatcagataacgatactaggacgaagatttcgtggttccacctaatttcaaatacaacaacgctgtatttctttgacgggataacggtacgaccgcctttgtttcaacaaaggtttgaaaaagtggtcatccattggttttcttccaggaaattttcagccgtgatttccctctcttatcgaagactctcaaattcaggtgtctttttcatcaatcaattatggcttcatttaaccactatctgcttaaaaaatcaagtaaattatttccaatcaccattaactgcatactgtccttttttcatttcgttgataatgacatgaatatgttctttaggtgccccagtatttttgtggactgcttcagtaatttctttcatcatattggtcaattgttcttgcgatcggccttctactaattctacatgaataaatggcatagtcatcactcctctgttcattagtatacgcttcttaattatgctctgcaataacctgctctattatcgaatgactgtcccttatcaagaataagcatttctgacaatctaaagattcttccatttcatttggctggatcttcacgccattttctcgaatgccatttttgaacatacttcatcaccttactggcttcctcttcatggtacaaaaattgatgttgtctgcttacataacgagcaatctcatcaaatagttgaacgattttccataaggattcgccgcaagtttcaacagatgaaaaacaaagtgccgtcaaccgctcatactcttcttctgataaataactttgaagatatttatggttctttccggtactgagacgatagtctgcttgatgcgctagataccaatcatattgccgaagcaactcttgccagcaaatttggtacaaatggtcggcggcatagaaaagctgatttctgacaagccctttgacgacataagtcgctacccaccaaaattcgttacaactgtcatgaaacgttttttctgtcggtggtttaatccaaaagatagaggcattaggaactgtcattccctgcagaagttcttttggatcatagagacgctcaagaaagggttcagcttgcaacaaatggatcaattcaaccgggcaaagcatcaagtctatgcgattgccatcttcaaaatgcatcaagaatgtaaaacgtcctcccaaagagggttgcgaaagcacagaactttctggagtctgcatgatcatgatctgtccgaattcttccagccagctaggttctgctattagttcttgcatattgtcaacaatataaacgatatcataatcttgaaaccgatcgcttattgcattaggttctcgccgggacccagagattgcgattgcttggacacctattttttgaccaactcgtaaaatcactgctagcatttcagcttcatcccgcacagctatcctccctttctttgatccaattgatctcaaaagcatacttaaattttaccatagaacgatttttcagacgacattcgcaaagattatatgctataattttatgtcgcaatttttttaaggaggattccttgtgaacgaacgtcaaaaagaacaactacatgtcgatgatacgatcgcattgattcgaagagaacaaatggtcttagcgcagcaaaaagcggacttggctacaaaaatggaggatcagttaaaagagatttccgaaaagaagattcgtggtggtgacagcgaagctttttacgaatctgttgttgaatatcagcaacacgagcaagaattgctgttaaaatatcgaacagcggaatctcaagagaaaagggtcaaaacattggaaacaatggctagcaatccttattttgcccgaattgattttcaagaagaacaagaaaaagaaacactttatctagggatcgcctctttaagggatcagcaagaagaaacaattgtcatcgattggcgggcacctatcgcaaatttatattacgaaggagaattaggcgaaacgttttatgaaacagaaaccgatcgctttacagttgagttgttgctgaagcgtcaattcaaaattcaagaaggccagattttgtctatggtggacacttcagaaatcatcaatgatgagtttttgctggagattttagacgaagcctcttcttctcaaatgaaaaatattgtctcaacgatccaaaaagcacaaaatcagatcattcgtgatactactagcaagttcatgctgattgaaggaattgccggcagtggtaaaacatcggcactgttgcaacgggtggcgttcttgctttaccgcaaccgcaaatggctggatgaagaacaagtcttgcttttctctcccaatcatttattttctgattatatttcaatggtcttgccttctcttggggaaagtgaagtgccaacacgtacgttccaccatttcatccaaagagctctgcccaatttccaaatcacaaaagaaacacagctagaagaaactttcttatcaggagcagacgatcggattgaaaagatcaaaagcagtctgaaacttgtcaaattgattcaacgatacgtacagaagatttctgcgatcggtccgttatttcgtgatttaaaaattcaaggacagacatacattacgaaagaacaaatccgtcgttggtatcaagaaacaaatcaagagcttcctttgtatcaacggagtcaattattacaaacaaaattactgaaaaaaatcggtggtcttgaaaaagatgaggccaaaaaagattgggtcaaagaagcaaccgaagagcagttgcagcaacattttgccaaagatccttatcaggagtacaccgaagaaaatgaacgccgattgcgtaagcaaatccggcagcaaatcgttaagaaaaaattccgctcactaactcgtggtgtcaaacaataccagtttatcaaccaaaccaagcagtatttacatttcttacaggcagttcctaagacgttgttagacgatcaagcgatccgtgatgaagattggcaacaacatctccgacttctgcgagaaggtctgcggcaacgccaattgacccaagaagatgccgtgctattctttttgctgatcaaacaactttacccaatctatgtggatgaaaaagcacggtttattttcattgatgagatgcaggattttccgcctgctcaagtggctctcttacgtcaattatatcctaaagccggaattactttatgtggtgatttaaatcaaaaggtctacggtaatgaaacgatcgttggttcgttggaagagttgtttcctgctgacagcgtgactcggtatcaattaaaaaccagctatcgttcaacgaaagaaatcacggattttgccaaccaattcttaactggttccgatcaagttgaattgacagcacgcgaaggggctctccctcaagtcattcaaaccgagaacgaaacagttggtctggactacttgcagcaagcattaaccaaatcacagtcacactggcgcacagctatcatctgtaagacagctgccgactgccgagcgctttatgcccagctctctggagagatgcaggatcaagttcaattaattacttcagaggaagattttatgaaacgtaaaatcatgatttttccagcctttttagctaaagggttggaatttgatcaagtattcttatggacgtatgggacttcttttgtgacggagcaagatcaattgatcttctataccatggcgacccgtgccatgcaccaattgattgttttgcaaaataacaccaatcaattgctagagaaagctgatcccgcaacctacgcattacaattgctttaaggaaagcgattgatacatcaaaaaaacgagagcaagcggacaatcccttgctctcgtttttgcttagcgataaatgatcaatcaaacaatattcttctcgacaaaagccttgtttgatcggtatttgttttgtcatttttttacagggttcgatcaccccttcaattcaccgataaagagtctcgtttctggatatttcatcgcgacaatcgtcaaaatcatctgaagttctgaaacattttcttcattgtcaggatcaaagattttactatgttttccaatactgccattgtcgatcaatcgatagatccggttccattccataaattgttcgacatctgtaaagtgactgaggggaaaaccggaaccatctagaatttctgttaaacgaaaagcaatataagaactgtcgatcacatattccctttcaggatcaatttgattacttttctgaaaatcaatgattgctttttctggacgatgatgcagcagccactctaacaacaagaaaaagccttccatccgataattgtccaaaaataagcgttgggacgcttccgatactcgaaaaaccagcgggatcaaaaaattccgtttataaatcagtaaaggcgcacgatctaccgtcacattcaagtaacgattcaaataggtagctccacgaaagccgcccaaacggtatccctctacaccgtattttttgtatttgcggcacagtgcagaacaatcagaaactgagacagatacttctgctaatttatcgtatccgcttaaaatccgatcaaaaggctctaaaacgattttttcttccaactctgccgctcccttcttgctcatactgctaattacttaaataataacataaaaaaagcgattaaaccaaaagaaatacccctttgttttttgaaaacgataaaaatgaaagtaaaaaaacacccccgaaagcacagataaactttcaaggatgtctttcttttattcttcttcgctgtctgctacattatgataaacgttttggacatcttctaagtcttctagtgcatcgatcattttttcaaatttttcaagatcttctccagtcaaagtgacttcattttgaggaatcatctgcatctcagcaattgaaaactcagtaattcctttttcttttaaagcttcttgaatcacatgaaaatcactaggttctccatggacgatgatttgaccatcttcttcaagaacatcgcgcacgtcgatgtctttttccatcaagtattctaagatgtcatctgcatccgtaccagaaaaaccaaataatgccgtattatcaaacatgtaagcaaccgcgccagaaacacccatgtttccgccatttttaccaaaagctgctcgtacgtctgctgctgtacggttaacattattcgtcaatgtatcgacgataaccattgaaccatttggtccgaacccttcataacgcaattcggagtattgttcatcccctgaaccttttgctttctcaattgctcggtcaatgatgtgttttggtacattgtatgtttttgcacgttcaataacaaagcgcaatttttggttcgcatgaggatcaggatcacctgattttgctgccgcgtagatttcgattccaaattttgcataaactcggctattgtttgcatccttagcagttttctttgctacgatatttgcccatttacgacccataatttcacttcgctttctttataatcaaaattccttaatcattatacttgtgatttcctgttctgtgaagtaatttcagttcaattctttagaaaaataggggaacgaccaaaattttgttctacaatctgtggtgatgccaactgatagatttgatctacccgtaaagaatacccaaaacgctcgctttcctttttgccaaatttagaaatgagcggcaggtctgtcttctttttaacttgctttaaataagtttgacctgctgttgtaaaccccaaaatacgaatcccggtattcttttgcgcttgttggacttcttcactggttgcttgaaacaatagataacacatcaaccgctgaagtctagttctagtataccgttttgttttcagaagtgccataaattccgcaaaagaagtggcgtgtaaacaatctttgatccgatattctaatccttcggtcacttgataccgggttcgcaattgttcaagaggggttgcgataagttggtactgcaacaatggccaaaaaaactcccaatcaatcgtttggtctaataaatcatttcttacactttcaggaacgtaccctttaatctcttgacctgccttcacagctttgcgaatagccgtcgcactggcaatcatcccaccagacaattcttgtgagtgataggccgcttgtttccttgaaatcggcaacagtttcattggtgatggatactgacacgtttcacgagcatagcgcatgcccaatatgtgattaggcaaatgagcctctgccaaaaagtctggatagactgctgcaaaagccgcatgcattttttgtgtataggtttggttctcagaagcattctcttggaaaaactggtcgatgacttcttgattgtttcgctcaaaatgcgcaaatgcttcataatcaaatggttcgggagcgtccgttccaaaacataaaaaggagcaatccaatgattgcagaattctaattgctccttttgcaaagaaatcagctgattgaactgaccaagccggcggtaattctacaattagatccacgccattttcgagtgcagctcgagcacgctgccatttgtcaacgattgccggttctcctcgctgcaaaaagttgccactcatcaccgccacaacaacatccgctccagatgcttttctagcttgctggacatgaaattcatggccattatgaaaaggattatactctacaacaataccgcatgcttgcatttctccactcctttctcccatcagcaaaaaaatttaagttctttttaatctaaaaaaaaccgcaaacaatcaaagcttgcggcagacaaagaaccaacgacggctcttttcatttggcggactatcaataaagtctgcatacatttcgatttcagagaagccagcattttctaacatccgctgataactttcaagcgaataggtgcgttctcggtgtagttcatccattcgttggaaagttccatcctcattttgcacaaaaaaagtcaaaaaatgttcaatgctgtgaggaacttctccttggtaactttcccagagaaaggcaaactcatctgtttgatagtggtagctgtaatcagggaatacttcatcgatctggtacgttgagtgtacatcgaacataaataccccgtcgtcacgcaagctgttataaaccccatcgaaaacttgttggacactttgttcatcttccatataacagattgagtcagagtaacaagtgatcgcttcgtaggttcccacatctgtcagatccagcatgtccccttctaccaattggatgggcgtatcctcttgttccgcccgctgactggcgatcatcaacatttcttctgaaaggtctaagccggttacatcaaaacccgcttttgcgaattctactgctaatgcacctgttccgcaggctagttccataatttgttttttttcacctaaatgacggcaagaaaaatccagccacttttgatagagactggaatccattacttcgtcatagacaaaagcaaatgtttcgtaggccattattaagccacgacccattcgttcagatcaacaagcggtgcatctgaccataatttttctaaattataaaacgcacgttctgaagcgttgaaaacgtgaacgatgacatcaccaagatcaatcaagacccatttaccaccatcttttccttcaacacggcgaacctccacttggttttcttcttctttgtcaagaacttcatcaatgatggcattgatttgtctgtcactgttccctgaacaaatcacaaagtaatcggctaataatgaaatttcacgaacgtctaatgccataatatcttcggcatgttttgaatctgctgctttaacagcaatttctaaaattctctggctatctatggtaattccctcctaatggtttgcgacccaatgattgtatgtttcaatcgtcttgggataaattggtgcttccttttcaatcaaataaagcaatgtatgtttcgtttcgtaagctactgcagcgtcaagatcaatcatagctaattcacgggcttctttcacaccaggaaatgaccgaccaggttcgatataatcggcaacgtaaatgatcttatccaacaaactcatttctgcagcaccagtcgtatggatacgaatggcttgtaggatctcttcgtcatcgatgcctaactctcgctgaacaaaatcggctcccacaataccatgccaaatagcattgctccaattgagcaattccagatcaaaaccatctcgccgaatgacaagctggaattcttcatctggacgctctttggcataatcatgagtcagcgcagcgatactggctttttccggtgaagcaccgaatttttcagccaatgcgacagcagttttttccacacctagtacatgctgaaatcgtttttggctcatatgcatttgtacttcctgcatcaataattcgcgttcagcaggcgtatactgttggctattcatccagatacagccccttttcttgaatatagtttaacacattttccggcaataagtagcgaatcgagcatccttgttgcactttcttacgaattattgtggagctgatatccatcaaaggcacatcgatccaaatgatcggatagggtgtttcaacgggataactaggacgacgaaccccgacgaaggtgaccaactccatcaattcatcaatccgatgccacttcggcaagtattgtaccatgtcgccgccaataataaagtaataacttgtatcagggttcttttcagtcagttccttcattgtatcaaaagtatagcttttccctttacgtttcaattcaatgtcttcaatcgcaaatcggggattatccgcaatcgctaactgtaacattgccagtcggtgagcagccgggatcgtctttttttcatcgacatgcggcggaagatactcaggcataaaatagactttatccaagcccaaagcttgcccaacttcttcacccatgaccaagtgggtatagtgaacggggttgaaattcccccccagtatgcccacttgttttttaggcacttgataagccgcttctgttgtatataaggtctgaactttgccaaacgaatttccttgcatgtcaaatcactcctataatgaacgtacgtttacagagatttttttatatttttcttttgtagatggtttgaataacacaatcacgcgtccaatgatttgaacaacctcgcattgaatcgcttcactgattgctgtagcagcgtcctccgccacttcgtcggtattttgcaataaagataccttgatcaattctcttttttctagcgcttcttcgatttgattgatcattgcctcattcaacccgcctttgccaatctgaaaaatcggtgttaaatgatgcgcttcactgcgtaaaaaccgcttttgttttcctcgtaattccatgttctgccttcttcctttaaattaatgctttccgtttgatcacatcaacgcctttgggtgcccaaccagcaacaactcctggttttgtgactgtgatccatcctaaacctgcaaaaacaatatctgttttttctttgatcgaaaattcaaagcgaactaactccggaaaatcagctaactcatcaggacgaggcggttgtaaaagaccaccaacatgtttttgataaaaagcatcagctttttctaacttcgtgcgatgcagcaccacatcatttgctacataagcaatgaatgagctgcgctctccttgaataaagtcaaaacgtgccactcctccgaaaaagagtgtttggccagcattcaattggtagcttttcggtttgatttccttattcggcgccacgatttttaaatctttctttccaaggtaatgagccatctgatgtcggtggatgatccctggagtgtcgatcaaaaagtgaccgtcgtcgagaggaatttcgattttatcaagggttgtccctggaaaacgagaagtagtaatcaattcttggactccagccgtctgtttgatgatttgattgatcaatgtcgacttaccaacattcgtaacacctaccacatagacatctcgaccttctcgataatgatcgatcgcctgtaacaattcagtcatttcggcggctttttttgcacttgtcaataaaacatcgattggacgcagccctgcttcatgggcacgctctctcatccattgggtcatttttgatttcttcaatgactttggcaagatatccactttattgcccactagcaacacaggattgtctcccacaaaacgatgaagtcctggaatcaacgaaccgttaaaatcaaagatatccactacatttacgattaatgcatctttttgaccgagttcgttcagtaaacgcagaaaatcatcgtctgtcagcgagacatcttggatttcattgtaatgtcgcaagcggaaacagcgttggcaatagacttctccggtttctaaccctttctctaatgcagagagcggtgtataaccaagctctgttggattttctgtctggatcagcgcgccacagccaatacaatgaatcatttcttcattcattatcaaattccacctcgccatttcatttctggattgtgtttcaataaatacttcataattcttcgctccagcaaacggttgaattgtgttttccatgaatccgtattaatgatcggcttcactaagatactacggacccctgctcgattagcaccttgaatgtcggtcatgatttgatcaccgatcatcacaacatcttctttttgcaagccgagttggcggtatccttgcttgatgccacgagaaaaaggtttcaatgctcgatggacgtattgcaaaccaaagggcgccactgcccgtgcgacccgttcactattattgtttgaaacgacaatcaccgggattcccgcattcttcatttctaacaaccaattttttagctcttcactaccgtcaggatcattccaagcaatcagggtattatcaaggtcagttagaacagctttgatgccttgcttcttaagttgatggggagtgatctgatagatggcatcgaccatccaagtcggtttaaattttgaaaacatagattctccttgattcttttattcatgtgacaaaaatagtcaatttgttgacacgtctagataaaaacagcttgtcagctgacaagtcgtcaatcagtccccacagggtcactgatgattatttaaaggcatcctacttataatgctactttcaacctgtaattatacaatagaatcgtgtgaaatactagactgagctacaactctcagcaacagattttcatctagttgaaaaaagcaacggatcatccactgctactttctttaaaaaataaaaaagccgaacgatcagaggagtgagcaatcaatgcagattacttctgcagcttccttcctcaagaatcgttcagacaattcattgtttttcatcttgaccgatatgaacgcacatcacactaaccaacttcatggtctaaaaaagatcataagacttttgccagaaaatcgattgtccgcggattttgcggtgcatcaaatatttgagcaggagtcccctcttccataatgaccccttggtccatgaaaagaacgcggtcgccaacctctttggcaaatcccatttcatgggtaacgatcaccatcgtcatcccttcttgagccaaacgctgcatgacactcaatacctcaccgaccatttccgggtctaacgccgatgttggttcgtcaaacaacatcacttctggctgcatcgccaatgcgcgagcaatagcgatccgttgcatttgtcctccggataagctttggggataagcttttgctttatccggcaaccctacgtcagtcaacagtttctctccgattttccgagcgtcttctttagacattttttttactttgattggcgacaatgtaatattatccattactgtcagattggggaagaggttaaagttttgaaaaaccatgcctaatttttcccgcatttgataaatatcattttttttgtcagtaatgtccgtccctttaaagtaaatattgccgcttgttggttcttctaacaaattcaagcagcgtaaaaaagtactctttcccgatccggaaggtccaatcacaacaacgacctcaccttttttgatttcagtattgatacctttaagcacctgatttgttccaaatgttttgtgtaaattctttactttaatcattgtatccatcttttttcctcctatcgccggtaacctttgccgagttttttctcccatagattcaacaagcgggaggtggtaaacgttaaaataaagtaaattacagcggcaacatataaaggagttaatggctgatacgaacttgtcacaacaatttgtgcgctattcatcaattcgtagataccgatagtggataacaaagaggagtctttgatcaaaacaatgaactcgttacctagaggaggcaagatattacgcaaagcttgaggtaaaataacataccgcatcgcttgtgcaggacgcaatcctagcgaaccagctgcttctgattgaccaaaatcgactgcattgataccaccacgaacgatttcagcaacgtaagcccctgagttcaatgaaagggcgataatccctgggaatagtcgtccaaagtcaagattcaacacaccaaacgaaatcgtcggcagtgagaacagcccctgcaataacccaaatgcaatcaatatctgaaccagcatcggtgttccccgtaacacttcgatatacgtattagcgatccagcgtaatggttttacttttgataacttcatcaatgcaaaggtgattccgaggatggtgcctaggatcactgtaataatggagatgacaatcgtaatcaatacccctgagataaagtaaggataataagtcgacaagaaggaaaaatccataaatttactactccgatctattcagccgcattttcgttggctaagtctgtattcttttgaacgtattcattaattgtccctttatcattcaattctttcaaaatacggttcaattcatcttttaattctgtgctgccttttggtagagcgatagcataagaatcatctggtgaagcttccaaagcaatgtcagccactgccaaatcatcattttgagcaacatatgagtctgcaacggcactttcaagtactagcccatcgatcgatccttgtttcaattcattgatcaagttaggcactttcgcaatcgaaaccaattgtgagtcagctaattggttttgaaccacagcctcttggatcgatcctttttgggcgcctaccttctttcctgaaaagtcatcgattgcagacaatgcatccgtattgtcctttttgatcacgattttttgttcaggtgtaaagtagttgtcagtaaaatcaaatgtttgttttctttcatcagttgctgagatcccagaaaccgcaatatccgcttttccttggctcaatgcagttagaacagcattgaactctaagtccattacattgactttgacgcctaattctttggcgatttcatttaccagatcaatgtccgcgccgacgatttggtctttgccatcaatcaaagcatggaactcaaaaggtgcaaaatcagctgatgtcgctacatttaatacaccagcagacttgatagcttctagctgattttgatctcctttttttgacgaatcagtgcttgatgatccaccattcccacatgcagctaaagttaataaagcagcaactgttataaatacacttatcaatttcttcatttgttttctccccttataaaataaataattatgcatatattcccatctttattcagaatatatacataataccacaatgttattgaatttcaaacaactatctgctgatgtatattatattagagaaatttcacaaggacaaataaaaaagcttgaaatcaatgacggatcaaaaatcgacattgatatcaaacttatgattaaaatttgcgaaaacgctgatagcgctcagcaaggagttggtctatattcttttgtgctagagcagcgatctttttggtgattgccgatcgcatttccgcgatcactgtctctttcgacaacagttcaccgtcgatggtctcgggaatcactttttcgatcactccaagcttgtgcaactcttgcgctgttattttcatgagtccggcagcttctttcgcacggcttccatctttccagaggatcgatgcaaagccttccggggataaaatcgcatagatagaatgttccatcatccatacttcatcccctaaagccaatgccaaagctccaccactgccgccttcgccaataatgattgccaagattggtacttttaaatctgacatttctaagagattgcgcgcaatcgcttctccttcgccacgctcttcagcgccgacgccgcaataggcacctgctgtattgatcaatgtgataacaggccgttgaaatttctccgcttgtttcattagccgcaacgcttttcggtaaccttctggatgaggagcaccaaaatttcgtcgaaggttctctggcaggttccgccctttttggataccgatcactgtcacaggtttcccatctaaggcagcgaccccgcccacaacagcttcatcatcggcatagagacgatccccatggaattcctgaaaatcgctaaaaacatgttcaaagtaatcaagtgccgtcaaacgatctttgctgcgggctaactcaacgatctcatgtgccgcttcaatcatttgtcatccacccctttatcgtatgcaatttaagcaattgggaaattcgttcccttaattgtgtccgtggaacgatttgatcgacaaaaccatgttccaacaagaactctgctttttggaagtcttctggcagttcttgtcgaatcgtttgttcgatcactcgtctccccgcaaacccaatcaatgcctgcggttcagcgagaatcacatctccttccattgcaaaacttgctgttacgcctccggtagttggatctgtcaagactgtcaaataaaataaaccggcttcactatgacgcttcactgctgcagagattttagccatctgcatcaatgaaaaaatcccttcttgcatccgtgcaccaccagaagcagtgaataatacaacgggtaagttcttcgcaagcgctcgctcaaacaatcgagtgattttttcacctacgacagttcccatacttcccataataaagttggaatccatgattcctattgccacaggttgctgattgattgtcgcttctccagttaacacggcttcatggagaccagttttttcctgtacggaagctattttttcgagataatcaggaaagttgagaggatcttctgttttcacatctgtatcccattcttccaagcttttttcgtcgatcgttaatgcgattctttcccaggcactgatacggaaattatagccgcaatgaggacagactttttctgcgcccatttcttttgtatataaggtccgtttacatctgggacatttcgcccaaagattgtcgggcactgttggttcattggcaggtgcctggccgcgattaggattgatgcgaatgtaattcttctttttaaataaagccattctcttccctcctattgttcaggcgtccagtttggcaagaattcctcttgtaaaaaggctgtgttgtagtctccggcaatcacttttggatgaccgatcagatccatttggaattctgcattcgtcactacaccctcagtcactaattcagccaaagctcgctgcattttcatcaatgcttcaaatcgattttctccatgaacgatgacctttgcaatcatcgaatcatagtaaggaggaatcgtatatccagagtacatggcactatccacacgaacgcccagacctcctccaggtaaaaacaaattgtgaatttttccaggggaaggagcaaaattaaaggctggattttccgcattgatacgacactcgatggcagcaccttgcattttgacatcttcttgtttgatatccagcggttcgccgctagcaatctcaatttgtttttttacgagatcgatattggtcaccatttctgtgatcggatgttcgacctggatgcgagtattcatttccatgaaatagaattcgccagcttcatccatcagaaattcgattgtaccagcattgcgatagccaacagcctgagcggcgcgaactgctgcagctcctagttcttgacgtttactagctgatattacgaccgatggcgattcttccaaaactttttgattgttccgttgtaaagaacaatcccgctcgcccaagtgaatgatattcccaaaagaatctcctaaaacttggacttcgatatgtcttgcgggatacacgattttctcaatatacatttcatcattaccaaaagcggcttttgcttcttgctgagcggaagaaaaatgctgcggcaattcttcttttgtcaatactttacgtatgcctttaccaccaccgcctgctgctgctttaagcatcactggatagccaatttcttcagcgatcgtcaatgcttctttcacatcagaaatcgctccttgactgccggggatcactggcacttgtgcttcgatcatcaaccgtcgggcattgattttgttccccattgcatcgattgtttcactcttaggaccaataaagacaatattgcattcttcacacatagatgcaaaacggctattttctgataagaaaccaaatccgggatggatggcttcagctttggtaacgatcgcggcgcttaatatttgttgcacattcaaataagagtctgctgctttcgccgggccaatacaaatggcttcatcggcaagttctgcatgtaacgcttctttatctgcttctgaataaactgcgaccgtttggatcccaagttcgcggcaagcacgtataatgcgaacagcgatctcaccacggttagctatcaatactttagaaaacatttttcacctatccaatcatgaaggtaagttctgcttctgcaacttttttgccatcaacataggcaatccctttgccgattcctgctgcagattttaccttgagtatttctacttctaagatcaatgtatctcctggtgttacttttttgcggaattttgctttatcaagtccgccgaaataagcggttttacctcgaaaatccggtaaagacaagagtgcaactgcccccgcttgggccattgcttcaacgatcaatacaccaggcatgactggttcatgaggaaaatggccttgaaaaaaaggttcgttgatggtcacgttcttctttgctaccacccgttttccttcttctagttcttcaatgcgatccactaagagcataggatagcgatggggaatgatttctttgatttcttgaattgacataactgacatagcttacccttctttcacacggaataatggttgatcgtattcaacgatctgctcattttcaactaagatttcaactaattcgccatcaacatcgctaacaatttcattcattactttcattgcttcaacgatacaaaggacatccccttttttgacagaatcgccgatttgtttgaattggctttgttcaggactaggttttaagtaaaccacacccactaaaggtgaaacgatctccgttcccgctataattggctctgaactaacctcgagggttccagcagctgttggttgtacgcttggtactggtgcagctgcagggatgctttcaactttgacatctgaactctcggatgatacttgacggctactgaacgaatttttattaaaataaagttcgatgttttcttttttgagctgcaattcagtcaaagaggactgatcaaattgggaaagcagatccttgatttcatttgtttccaattaagcttcctcccaacgtttcaataagatgactgcattgtgtccaccaaaacctagtgagttactcattgcatacgtaatttctgctggctggctttggtttttcacaatatttaagtcgatttcaggatcttgttcacgaacattgatggtcggtggaataaattgatgctgcaaggctaaaagcgaggcaattgcttcgattcctcctgctgcccccaatagatgtcctgtcatagattttgtactgctgacgtaaggtttgcgatagtcgtcccctaaaccatattggatcgatgtagcttcagctacatcattagctggtgtgcttgttccgtgagcattgatatagcctacttcggctggagtgatcgctgcttcagacatcgcgagtttcattgcttttccagcacctgaaccgtcaggattcggtgcagtcatatggtaggcatcacaattggcaccatagccaacaacttccccgagaatcttcgctccgcgcttttgggcatattcaaatgattctagaatcaaaaccccagcaccttctcccataacaaacccgctgcggtttttgtcaaatggtgtggatgctttgtctggatcagattccgttgttaatgccgttaaagaagcaaaaccagcgataccaatctcacaaatcgttgattcagatccgccagcaatcatcacgtctgcataaccatgtttgatattgcggaaagcctcaccaatcgaatgagtaccggatgcacaagcagagaccgtagttgtacaaataccttttgcccccacacgcaatgcaatgtttcctgccaccatgttgacgatcgacatgggcacaaacattggagacacacgatttgcacctttttcatgcattcgaatcacttggtcttgaatagttggcaaacctccaatacctgatccgaccatgacaccgaatcgatcggcatctaacgcttcagaattcaaacccgccattttcattgcttcaagggcagcatagatcccataaatcgaaaaaagatccatccgtttcgtatcttttttgacaaagtatttttctagtggaaactctttgacttcagctgctactgaaatccctgttccactggcgtcaaatttggtaatggggccaatcccattggttccattttgcaaactagctaaaaatgtttctggatcattccctattggggaagtcacaccgtatcctgtaataactactcgattcataagtatctcctttctatccttgcatggccattccgccatctacgctgactacttgacctgtgatataagcgctttgggccaaaaaaaccgcagcttttgcgacatcttctacagcaccaaatcgctgcaacggaatattattgatcgattgttcttttaccttatcagaaagaactgcggtcatctccgtttcaataaatcctggtgcgatcgcattacaggtaatgcctctagccgctccttcgcgggcaactgatttggtaaaaccaatcacgccagctttacttgctgcataatttgcttgaccaatgttgccagtcaatcctacgacactagtcaaattaatgatacgtccttcgcgtagtttcatcatctttttgagagctacttgcgtcatgttgaaggttccagtcaaattgatcttcaatacactttcaaattcttctggtttcatgcgcaacaataacttgtcattggtgattcctgcgttgttgactaaaatgtggatcggtcctaattcagcttccgcttgtgcaagcatcgaaacagcttgatcgtattcggatatatcaccgttgactgcgatgcatttcacaccaaaacgggtaatcgtctctataagagtttgaggtatctctttccgcccattcaatacgatattggctccttctttggcaaatgcttctgcaatgccaaagccaatccctcttgaactaccagtaataaagacatttttatttgtcagttccataaattcctcctaatcaaaccttgaaagtgtgtcaaaaagtgtttgagcatcttccactctcgaagcagcaatggttttgtcgatttttttcaaaaaaccggtcaatacttttccgggaccgatctcgatcatctgctcaattcccatttgtttcaactgctcgatgctttcataaaaacgcacaggtgatttgacttgcttctctaataattctttgacttgttcttgtttcatcggtttcgcagtcgtgttgctgatcaccggcacctgtaaatctttgatttcaattttcgccagctcttgagcaagttgtttagaagcgggttctaaaagttttgtatggaaagggccgctgacatttaatggaatcattcgtttggctcccgccgcttgcaataactgaacggcttggtcaaccgcagctacttccccaccgatgacaatttgctgcggcgtattgtaattagctggcgaaacgatccctacttggctagcttctttacaaatcgcctcaatggtttcagccggagtattcatcacagcgaccattttacccacaccctgtggtgcggcatttgccataaacttgccgcgtttttgcacgagggctacagcagtttgaaagtctaatgcgccgcttgctactaatgcggaatattcacctaagctcaaaccagccaaagcatcggcctggagacctttttcttttaacaaacgccaaaaagccacactgacggttaaaatggctggctgcgtatattcagtttgattcaaacggtcattttcagtaaaacatagttcagtcatatcatagccgagcatctcacttgcttccgtaaaggtttgttgaacacttgattcttgctgatataactcctgacccattcctacatattgggctccttgaccgctgaataaaaatgctgttttcattttaaactccttttttgaactgaaagattttggagaaaatggcatcttcactcgcagatctcagcgagtgaaacacactctttctattacaaggaaaggctaggctgtttgcctagcctcgttttttatgcttgttgtttttcaacgtatttaactagatcttcgacagttttgatgccgtcttcagtttcgatttttacatcgaattcatcttcgatctcgttaatgatttggaaaaggtctaagctgtctgcttcaagatcctcttgaatgtttgtgtttaatttgatttcttctttttcttttcctaattcttctgctacgatttcttgaattttttcgaataccatgtgtatattcctccaatgtgttttcttcaatattgattgtgaacaggctataaagctgccagcatggtcccccatgctaatccgccgccgaaacctgagaacaccactttttgtccgctgcctaaagacagcgtgccgcgtttcacttcttcatctaacaaaatcggaattgaagcggctgaagtattgccataaaattgcatattttgcaaaaacttatgtcgcgggacctttaatttccgagccactttatctaagattcgggaattggcctgatgcaacaagtaataatctaccgattcatgctcactgattgcatgaatggattgaacgacatcgcgtgtcgcaaaatcaaaaatttcacgaccaaccatctgcatacaagcactgtattggattgacgaacttccgtaaggattcttattttcaacaaaacctgatgtcagagagagtcctctggttccatcagactgcagcgattccttcaagagatgctgatggttggttgcttctaaaagcaccccgcctgccccgtctccaaataaaactgcggttgaacgatcttcccaatccaagacctttgacagcacttcaccgccaatgacgagcccttttttagaaccggtccgaatcaatttttctgctaaagacaatgcataaacaaatccggcacaagctgcgctgatatcaaaagcaaaagcttgatgggcaccaatattcccttgaacttggcaagcaactgccggtgtattgaaatccggagtgatggtcgctactaggataaagtccaattcatctggagcaagtccccttgatgccaaaagtttcgtagcaacattcgtacataaatcggaagtattttctccattactaattcgacgttctttgattcctgtacgtgaaaaaatccagtcatctgatgtatccataatttctgaaagttgctgattcgtcacgatttgttcaggaacatagcttgctgttgcggtaatctttccaaacatattcatccgttacactcacttataatcttgtaaaaagtcatgcagattttttaaggctttaagtaaagcttgctcttcatccgtagacatctggcttagaacgcctttgaccatctcacggtgaaaatgttgatgtacccgataaagcaatttgcctttttttgtcaacgcaagtttgactacgcgtcgatcgtcttcactgcgaatgcgttctacatattcttttttaaccaaacgattgattgcaatggtgagggtcccaacagtaatagaaagctctttagcgacttctgaagttgttttcttcttgtacatgccgattgcttcaatcgtatgcatttctgtgattgaaagatctttaaattgtgatttctttaattctgattcttcgatcacgagaatgtcattgaagacactgactaaatagtcgttgaccgtttctaaatttggttccatatctttcaccatccgaatagtttgataatcaaatcatttgatagtcaaactataaagtaacttttagagaattgcaagaaaattttttgatttttattttttttaagcgcatttttattttcagtacgcttttctaaccttcacaagtttttaagttgacaattaacagagaatcgagtagttaaaaattattttgattatcaaagatttcttccatcatttcacgaaaatgattatcgtgtcagaacatcacttgttctacaccttaaattttggtatcgttgcagtgtagaaatgaggtgatggacatcaacgcacggatcgaatacttaaagcaaaaagcaaatgcgttaccccaaaaacctgggatttatttaatgaaagattctcatggcggaattctgtatgttggaaaagccaagcaattgaaacaacgagtttcttcttattttcgcaaaaatacacagcatacaaacaagattctgcgtttagttcacaatgtcgtagatttcgaaacaattttcgtagacacagaactcgatgcgctattgttagaatgtcagttgattcagcaacatcgtcccatttataaccgtcaaatgaccaactttcttaattaccaatacatccgctttgatgcaggaaacatcgttcgaacaaatgaggcagcagaggatgcaataggaccttttcgccgatccaagcaattgccggaaatcattgagatattgacagaaacgtatcaattaccttctgtcaatccttataaacttctctcgttgtccaaacagttgccgttaatgcaaactattcctttggaagaaaaactgaatgagctgaaacttttctttcgtgcagaaagcaagacaatatttcgttatctcgaccaacgattgcattattttgcggaacagttactttttgaacaggctggtcaactactgtaccaaaaaaaattgcttcaatccttttatcgagaaattctcgaggtgaatactctgatcgctctcccagaatttcgctttgagattcctcttgaaacctctcttgaagcttctcttgctgccgattcatcacaagtaaaagtctatcaactctcttttggacaaatcattcatagcgaagttgtatcaacctctgatgcttttgttccagcacctttaacaacagctaaacgattgctgccaacagaccttgaccctctacatataattttgcgccagttaagacaattaaattttgtgctgtcaaatacctaaacgctcaaatgattgcaacaaaaaaccagcgctccttaaagaggaacgctggcaatgcgtatggcatttttcatctgaacgctgatacgtttattggatcaaatcataaatttccatggctacaatatcaatattatcaaattgataaggctgacttgactctgcttccgttaactcaaacgtttctgtggtgttatcgtaggtcactgtgcatttttctacgccttctttttcgaaacggcgaacttgaacctcgttgtcttgcgcttcgaccatcgcttctaaacgtttgatgatagcgactaattgcgaacttttcattcgtaagcctcctttttctgtccgttatattgtatcaaatcatattctatcttgcattgattttttacaatttattttgtcattttaagatttttttccatcttgccaccaaagcttaatcagggcttgagtcccatcactttcatagccagcttccgctaagcgatcgtacattttttttgccaaagccgtacttggcaaatccagtcccattttcgctgcttcatcaagtgcgatacctaaatctttgataaaatgtttgacaaaaaaaccaggtgaaaaatcttctttcaaaatacgggggctgtagttggccaatgaccagtttgcggcgctgccaccagataatgtctcaatgacttgcggaagttctaaacctgctttatcggcatagacgagcatctcagtcattccagtcatcgtgccagcaatcatgatctgattggccatttttgtgtgctggcctttgccggcagagccatgaagatgacacgtttttccgacaatctcaaatagtggttcaactttttgataggcttcatcgtcaccacccgccattatcgtcaacgttccattttttgctccaaggtcaccaccagaaactggcgcatcaatacttgccgcaccatgctcttttgccgtttgatagatttgttctgctaattttggcgtactagttgtaaagtcaactaaatattttgccgcgacatcggtttgaaaaattcccttttctccatagtaaacttcctcaacatctgcaggatagccgaccattgtgaaaacaacttcactttcagcagcaactatttcaggcgtatcacaccaaaccgctcccttagcgactaattcgtctgttttgctttttgtacgattatacacatttacatgatgtccgcttgctaaaaagtgaccgaccattgattggcccatgacacccgttccaataaaacctagcttcatagtcatacctccaaaaataaaaaaattcacgtctttagtatacgctaaaaacgtgaacttgactgcaataatgtttaatcaattgttcgtttaaatgatttcaatttgactttgaattttttcaatgtttcttcggtttccttgtctaggcgttctgtctcatagtaagcaatcatatcatggtaaaaagaaagcatcgattcaccaaagtgtgccgcagagatttcatacatttttcgtgctaagacactttcattcctaggaatctgctgttgataataatgaataaatgcagaagcaaaatcttgatcggtgtcaaaggtcacaccaagagatggatcatcgatcaatgtatttaaataatcattgccttcaacgactaaaggcgtacctgctgccattgcttctgtatacgtcagtccttgtgtctctgaagtagaagcactgacgaagaaatctgctgcatgataatagatggctacttcatcatttgcaacctctccaacaaaatgaacatggtcagacaagttcatttcttgaactttttcttccaatttttctttgtaaggccctttgcccacgatcactaatttggctgaaggaatttctgctagaatatcaggcagtccatcaacgatcgcttggatatttttctcataagaaatacgactcaatgataataacattggctggtcttcttcaatcgccaattcttgacgcaaggctcgtttcatttccagagtgatatccggacggcgaaatttctctacctcaataccagtgggaatgatgcgcatcggcgacacaacgccataactgcgtagtgtatcgatgacccgttcactcgggcagacaaccccagtagaatgattggcaaacagacgagagaaatactttacgtgtgtaggtcgcaaaacttttcctttcgcaatataatgcagataatcttcatacattgtatgataggtatgaatcacaggaatctgtagttttcgacccaccatttttcccagtagtcccgcaccaaattcagtatgggtatgaatcagttctagttccaactctttcgcaatcaaataggcataccacatgccccgcaccacgattctacggtctttgaaagacacgaaaggcacactaggcatacgaatgatatcttcctcatccatttctgcatttggatctgtagtcgtaaagatatagaccttatggcccttcttttccaactcttcttttaatgttttgatcgatgtcgctacaccgctcacttgcggaaaatatgtgtctgtaaaaaatccgattttcacaacggtacctccaaacttgccgtcaatcaacgggtttttcttctaaaacgctttgataaactctctttaactcttttccaatttcttcaatactccgttctgcagctgcttgatagccggcagctgacagatctggtacacgaccttctacgatgttagcaatttgttcaacgaactcatcaactgtccgtcccatataagaattttgattctcttgcaaccaaccatgataaacaggaatgtcacgcactagaactttctgcttactagcaagcgcctctaacacaacgatcccttctgtttcttcataggaaggaaagaaaaacagatctgctccagaataggccccctcaatgacatctcctttgatatagccaggaaaaataacattttcaggatggttttctttcacgagatctcgaaccgctttagggatcgtatacataggtgtatgtccaaaccaaataaaagtatactctggcatgcggcgagcaatctcaacaaaatcgacaattccttttctctcaaaatacaagccaacagaaataatcactttttgatccgccgacaattggaaatagtcgcgaaaagcctgttctttttttggttccggacgatatttgtccaaatcaatcccattagagatcgcacagatcggtaccttgatgccatacccttccaatagttcttttgcgtagggcgttggggttatcaattgatcggctcgggaatataaattgatcaaatattttttgtataatggcgataactggtttgagccgataaatgaatttcgaaaatcttcttcagtcgaatgcgcatggtaaattacctttttgccttgtttccttgctttattgatttgattcaacgaattgatcccatacgtattaatatgaagtatatcataatcctcagcttgtttgtctaatgtatattcaacaccgatactgctcagtgcacgttgctgatgcgcaagtgctctgccgataccagatttctctaaaagcttttcactttcaaaatagagaagtactttcaaacgagattcctccttctaaactgttacatctagtataacatagctagacgagaacaccctccaactcaaggcctagtttttgtattgatttctatcatacgtcaaaaagctggtttatcaaaggtcatcaaaacaatatgacaaaactgttcgctcccagaccacaaaaaaagcagcaagcgaattcgcttgctgctaacttttaactactttacatattgattgatcaattcgactacttcttccatcgtatcgcaatcttccaaagcacgttttgctaattcttgcatgtcagttgttgacaagcgtttcattaagctccgtgttttaagtacagaagttgcgctcatagagaattcatctaagcccataccgactagaagtggcacagcagtttgatcgccagccatttctccacacataccagcccatttaccttcagcatgtgctgaatcgattacgtttttgatcaaacgtagaatagatgggttatatggttggtaaagatatgaaacttgttcattcatacggtctgcagccattgtgtattggatcaagtcattggtaccaatactgaagaagtctacttccttggcaaatttgtcagctaagacagctgctgcaggaatttcgatcatgatacctacttgaatatcttcagagacagttacgccttcatcgatcaatttttgacgttcttcttcgtacatttttttcgcagtacggaactctttcaatgttgccaccatcgggaacataatacgcaagtttccgtgagcagaagcacgtaacagcgcacgaagttgtgtacggaacatgccgtcacccaactcagataaactgatacgcaatgcacgatagcctaagaatgggttcatttcgtgtggcaatttcaagtaaggaagttctttgtccccaccgatgtccattgtacgaacaacgactggtttaccagccattccttcaagaactgctttgtatgcttcatattggtcatcttctgtaggaaaatcaggagaatccatgtacaagaattctgtccggtataaaccgacagcttctgcaccattgttgtgaacaccttcaagatctttaggcgttccgatatttgcagctaattcaaagtgcttgccgtcagctgtaacggtttgagcatctttcaatttttcccattctgctttttgttccgcgtaagctttccctgcttcaataaattcagcagcttggtcttcagtaggattgatgataacatctcctaagattccgttaactgccagaatatcaccagcattcactttagctgtgatttcttttgatcctacgattgcaggaatctcaagagatcgagccatgattgctgagtgagaggtacgtcccccgatatcagttacaaaagctttaacgaagttgcggtctaattgcgcagtatcacttggtgtcaaatcgtgagcaacgataacaacttcttcgttgatcattgaaggatttggcaacgtcacatttagcaaatgtgccaagatacgtttcgcaacgtctttgatgtccgctgcacgttcttgcatgtatgcattgtcatccattgcttcaaacatgccgatatacatgtcagtgacttctttcaatgcagcttctgcattgactttgttatctgccatgttttgtttgatttgtccgatcatttcaggatctgacagaaccattaaatgagcatcaaatacttgtgcttctgcctcgcctaaagattgcgctgctttgtcacggatttgttgcaattccgctgttgactttgctagagcttcatctaaacgagcttcttctgctgccgtatcttcaacatttacttttgaaaaagataaatcaggttgtactaacaggtaggctttggcaacggctacaccatcactagcagcaattccttttagcatctcaaccattattcagacaaaccttcttttttcattgtttcaacgattgcagcgattgcatctgcttcgtcagcaccttcagcagtgattgtaacgtcagaaccttgaccaacacctagagacataacgcccatgattgatttaaggtttactgatttacctttgtactccaagttgatatcagagttgaatttgcttgctgtttgtactaataaagtagctggacgtgcgtgaatccctgtctcagcaactacgtgaaaatctttcttttccatattgatcaatctcctttatgatacggtttttttgtggtgaaggctttttttgactcagtcaattgtcagactcaaaaaaacgccctttcaactgttaagattaccatttttttctctgatagacaaccgttttctcttaagaaaacgactgaaatgaacctatatttgtttttatggttggtaccgatagatgatcttgccattcaagccagcctcgccgacaaatttcatgcggtcttccaattttaaccatgcttctcgaaatagcagaaattcggattgttctaccagcaattcgtcgatttctccagagcgcaactgttcaatttgttcaacaaatcgattttcattcatctctatcacctcttcatcttctccattataaacgattcttttttcagggaaaagttgtttccgtcatcaaagctgaaatccttgcagtctgaaaaaaaaattgtataataaagttatggtcagtaaaggtcaatgaaatttttgacgctgctgacaattattcaccgaatctgcaagtgtatctttttaccatgagtaaaaatcgcggtagaatgatagatgagcaaatgataagaaaggtcgtgaacatatgctttgtcaaaactgcggtaaaaatgaagcttctattcatctttatgccaatgtcaatggtcaaagaaaacaactcgattattgtcaaagttgttaccaaaaattaaaagcacaatctggaaatccaacaaatatgatggctcaggatcccttcggcttcggaaatcttgatgacctttttcgacaaatgtctcgccaaatgcaacaaggaaattcattttatgaacaaacgcctccaactcaaactggaggaaacggcataatcggcggacaacctccgcgcaatggccaagcaccttctggtcttttaggcgaatacggcatcaatatcacacaacaagctcgagacggcgggatcgatccagtcgtaggacgtgacgatgaaattcgtcgggtgatcgagatcttgaatcgccgaacgaaaaacaatcctgtattgattggtgagcctggtgtaggtaaaaccgctgtcgtggaaggtctggcacaaaaaattgtcgacggtgacgttcctcaaaaactaatggataaagaagtgattcgcttagatgttgcgtcactggttcaaggaacgggtattcgcggacaatttgaagagcgaatccaaaaattgattgaagaaatcaaacaagccgaaaatgtcatcttattcattgatgaagtccatgagatcgtgggcgcaggggctgctggtgatggcaacatggacgctggaaatattctgaaaccagcattggctcgcggtgaattacaaatggtcggcgcaacgacattgaacgaatatcgcatcattgaaaaagatgcagcattagaacgtcgtttgcaacctgtccgagtcgatgaaccttctgtagaagaaaccatcagtattttgaaaggattacagcctcgatatgaagattaccatcatgtaagatatacggatgaggcaatcaaagccgctgctaccctttccaatcgctacatccaagaccgtttcttgcctgataaagcaatcgatcttctggatgagaccggctcgaaaaaaaatctgactattcaaattgttgatccgaaaacaatcgacaagaaattgcaagaagcagaagaacaaaaacaagctgcttctagagaagaagactttgaaaaagctgcttactaccgagatcaaatcaataagctgcaaaaaatgaaagaacgtcaaatcagtgaagaagaaactcccgtgatcaccgaaaaggatatggagcaaatcgttgaagaacggacgggcattccggttggcgaactcaaagaaaaagaacaaactcagttgaaaaacttagctcaagatctgaaatcgcatgtaatcggacaagatgaagcaatcgataaagttgctaaagcgatccgtcgtaatcgtgtgggattaggaaaacaaagccgtccgatcggttcgttcctttttgtcggaccaactggtgttggtaaaacagaacttgctaaacaacttgcctatgaaatgtttggctctgaagaatcaatgattcgttttgacatgtcagaatacatggaaaaacacagtgtctccaaactgattggttctcctcctggttatgttggttatgaagaagctggacagttaacggaaaaagtccgtcgtaacccttatagcttaattcttttagatgaaatcgaaaaagctcatcctgatgttctgcatatgtttttgcaaatcttggatgacggtcgtttaactgatgctcaaggacgcacggtcagcttcaaagacacattgatcatcatgacaagtaatgccggcactggaaaagtagaagccaatgttggttttggagcagcccgggaaggtgtcacacgatctgtcttgaatcagttaaataactacttcacaccagaatttctgaatcgctttgatggcatcattgaattcaaagcattaagcaaagaaaatctgttatccatcgtttctttgatgctcgcagatgtcaatcaaaccttagccaatcaaaaattgcatattgaagttccagaaaatgtccaagaaaaattggtagagcttggttatagtgctacgatgggggctcgcccattacgccgaacgattcaagatcatatcgaagatggtatcgcagaattttatcttgatcatcctctagtccatgatctacaagcaactttggattctgaagacaaaatcattgtgacagcaaaaactgttgacacacccgaagagccaaaggaacaagaaaaacagccatctgatgatgagtaaaatcctcgcaacagccagacatcgtaccttatttgtctagatttctatgccagacgcctgaataacctcaaaaaaaccaaggttttcaagctgtctggcttttctttttaaaaaaaacgccctataatattagtaaaaatacatagaatgtgaggtgagtatggtgaaattgatcaatgtgacaaacagccattctcgattagttatgaatcagcttgaaaataccgatgctgaaatggtaaaagtatatactgccggagacatcacagtcatctttacttctgctccaaatcacaacgaaatattgctgatcaacaaaaaacgcgcaatcaaacctaccgaaattgaagaaatcaaacattacttcttgaaaaaattaccgcctggttcttatgaacctgaaacgatctcagttattgaaatgccagatattgtagaaatttctatccaaaaatcgctttcttcgcaaacctaataccaataaaatcactataaaaaatatctataaaagatgactgtcacagccctcttttatagatatatttttttgacttatttatcgttgcccctgcgaaaaaaaacaatctttaagcaaaagcatctgtgccatgactcaatcaacagatcgatcctaactaatttttgggggcactttcagatcgaattcgccgttcgatgatcctcccattgataaatatccctaaccttttccatgtttcactgttatggatatcctcaagaaagaaaaaacactgattcttttttgattcaacaaatcgatcagagataacgatatctgcttctgcaaggttttctaccatagttacagtttcctttttatatacacctgttatataattttttactaacattacatagttggcatgagaggtaatattaatcatgacattcaaaggttccgccatcacatgtccaacataggagtatagtagctctgttagttgtgtactaaatatatccaaatctctttccgctatgctttttttgtaaactgattttatcatctcttttatttttagaaacttatcgttcaacaacaatttcttatcttcgtggtaaaagaaggaacttaaactcagcttatccgtgatcaaaaaacgatatacaagatgaaaaacaaatgtgctatgaaggttggcaggaatactgtaactctcctccattttcttcaaagcttcacatgcatgatctacgataggatttccagataatttcattaatcgcttctccaatcgttcgcagatttcagatgtcaaatattctggaaagaaataaatagcgaaaagatagtaaaagaatttttctgactgataaatagaatgattgatctttttatctaacggataaaaagtctgacaaaatcctagtcggatttcttcatataaacagtcgcttatagccgtctcttcttttgaatctatatcagtataacttcctattttatgggcatccataaaaactctagttattctagaaagtttctcttgcttgatcctcgttacattcttttcgttatgatatctataataattgtcctcagcaaatgtcgaagaatgtgtattcagaatataggaaagtactcgtatctggctttccttaccttccacaactaaataattcattttcttcctaatctggcaatcgactccaatcgttcgaatgatatcggttgctttattgactaatttgtaacaataagactgactataattaaattgcattgataacttgaccatccctacttttcgatgtttaagaaagtaattcaggacttggaaaacagaactttgtctaatatactgtatctttaaacttgaatacaaagacgtaaaagtttctggggtctctatgtcagaaagtctaaataatctattttcaaatttaatgagtgagtcggttatattcagttctactatgtaatcctcattgatctgcataatcaatgacttcaccttgcgattagtcagcgaatgcttacaagctagttcatcaattgatgtttcagtctttgaaataatatcctctaacaagtttaatttttgttcttgcctctctgtcagaaacaacttccataaatccatgatgctctcctttttaatgatagttacttcgataattttgtctatctctgaaacgaaacaattattaagtacagttacctattgagatgaaaagatactctttttatcggtggaaatagtttttttagataaatagtgataaaaaataagaacctctggtcgtcgctgagaattgtcgccctaggatgataggtatgtttaaactaaaatgagctaatctacaatgattgcgaatcatttaatctactcatgagtgaacactttcttttatcaaaattaaaaagctccagttccgatataaaagaactcgcgaagacaatttgtatcaaacaaataaaacaattctttgaggaaataaaaactgccaggaaaaatttcagcaagtgcttttctattaacagatgacagaagcggacttttaagcaacaagaaaagtttagaggcgaagtacgtccctaaacttttcttatttttttagcaattttacaagcgaaaaaataagcaaaaataaaactagtgataaggcgatgatcaaccaaagattgacttttgacttcactgtaacattattactaagatctgtagtctcctctataaactgatcaatttcttctttcgtataattaaaatacgttatcgtctcatcttcgccatcggataaaacaaattgatactccccagacatcaattcagctttatctaacaatggcgcctcaaacattgtttttatatacggtgaaagcacaatcttctcttgttctatctccccttcagctatgatctcttgatcaggattgattactcgataggagccaccttctgcataagtaacaagtggattcttgttgtaaaggtaataagaaagagtcgttgcgtttcctgtaatcgtaaatttaaagtccccaatgatctgttttgtttcttgagcccattcattttgtttcaagcgaacaacgattactttttgataaacttgctgaacatttacggaatctttattttcttgtaaaccaattgcttgagagaaattgattccacctaatacttccccaataatctttttatttacattaattatgattttgatttttttgctttgctttgcatctatttttaaaagaccatcttccaatttaccttcaattggtaagagttttacgtacttctttaaatcataatctttatttagcaaattgtttgtttccgcaacataagtcattgaagtcctagttgaaacagcgatactaggaaaaaccgatacttcaatggcatgactttcatgattagtaacagttgctgtataagtatacttttggttcagatcaggcgaaaattgaatatcttttactatacttgaattcttgtctgcttggatctgaacttcaaaagaagagccaatcgattcttcggccaatgcttctggactgaaaaaaaatattcctaagcacaggaacaaaagaaacaccctaaaagaataagattcattcttgtagctaggatataacatacgattaaggagtgacgtctgtcacttctgatgcagttagtgtgattacgtaatcacttgccttagtgttgtcaaaagttgaaggatcaattgtataatcaaaagtaccttcttcagtcgtttcatagccttgacttgcttcaactttgaatacttcactcgttgcaatcgttaaaccaggtgctgaggtttctccaggaactgctgctgttatcactacttgctttgctccaaatgacttattcgttaatgttccagataacgtgaaagtacctgttagcggattcgctttcgtttctgtgaaactaatatctgcaaaatctacagtttttgtttcaacaggagtagctaaagtaaatgttgctgctccttctgtgacatttacagtaactacttcaaactatttgaattcttacagaatagttttgccaaagaaagtgccggagcatatgatgccggaaacaatcaactcctttctgaatatttaagtgaccattcaccggatgggaaaatcattttcttagcagctaatcctgatatacctatcaaagggctcggaacgcggctgctaaatgaactacagaaaagagtgcaaggaaaagaaatttatctttttacagatagtgcttgtacgtatcaattttatgaaaagcgcggttttcaacgtcaaaaagaaaaaaagatttcattaaaattgcccaacaaaaaaattgatcttcagtgcatgctctatagcaaagtgattgacaaatgatagccatgctacgcaacaaaaacgtttttcaaatgagtgcaaaaaagcacagccctaatggctgtgctttgctaatgattggaataaaaatttatcccctgttcggtatcttctacataactatgcgctggagctttagtcactaaataacaaaaataaaaatccccaatacaggctgacccatgaaaagaagccaaccagacaaatgcataaggagaaatttccctatacgcatacaacagccataagaccaaagtgatcaagacaaaaggagcaagcaaaataagtaaaaactgccaccttgaataaaaggaattaggacttgttgcataggccaaaccattcttaaaaccaaatttgacttttccttccttattgaacagcttaaaaaaaatcccgtgaatcaattcgtgaacgatgattaaccctgccattgatagaatggcaataacgagatacattaaatcgatagtgacttcttccgttaactttctatctaatgttaaaagcgtaaataaagcaaagaaaataaccaatagaggaatcgttaagatattcagtttcatgattagctttttatcgtcaagcaaattgacacgcttgattaatttcataatgacccccttactcctatttgcaacactataagcgctcgtctcacgtcataaattattatatcagtttttttagaccaaaacaattcgattttttactgatacaaaacaaaaaaacattcttatcaaaaacgataagaatgtttttttagacaagaaccaactcatttctcgctcccatcatttgagaacacttgccgtcacaagtactagcagtgttttcacatcaaacttttcaattcgacatctggatatttgtcggcgaaccaacgcatcgcgaattggttctcaaacaagaacaatggctggtcgaaacggtctttggctaagatgttgcgacttgaactcatcttttcatccaaatctttaggatcgatccaacgagcaatcttatgtcccattggcgacatgatcacctctgcattgtactcgttcagcattcgatattgaaatacttcgaattgcagctgtccaaccgctccaataatgtattcatcactgagatacgttttatacaattggatggctccttcttgcactaactgatagatccctttatggaatgatttttgtttcataacatttttggctgttactttcataaagagttcaggtgtaaacgaaggtaattcttcataggcgactttcaatttcccttcatataaagtatcaccaatttgataatttccggtatcatataccccaatgatgtcgccggcaacagcttgctcaatattttcgcgagtgtctgccatgaactgggtcacattacttaatttcatttttttgcctgtccgctcaagcgtgacatccattccccgttcaaatgttcctgagcaaatgcggacaaaggcaatccggtcacggtgtgcggggttcatattggcttggattttgaaaacaaatcctgaaagctcttgttcgtatggactaatttcttctcctgtccttgtcttatgtccgtaaggtgctggtgcaaattgtaaaaatgtttctaagaaagtttgcacaccaaagtttgttaacgcagagccaaaaaagacaggggtttgatcaccacgagcgattttctcttcatcaaaggaatcgccagcttcttgtaataattcgacttcttccaacacttgttgatagacaccattttgattcagcggatgatcttggggaatttcaccgttttgattaaatggaatcaggcgttcaccgccatgagattctggacgataaatttcaacccgttgattgtgaatgtcataaagtccttcaagcccttttcccattccgattggccaattcattgggtaggactcgatttgaagcaactcttctagctcttctaaaagttctaatggttcacgaccatcacggtctaatttgttgatgaaggtaaagatcgggattccccgtttttttacgacttggaaaagctttttcgtctgtgcttcgatccctttggcactatcaataaccatcacggcgctatcaacagccattaacgtacgatacgtatcttcagagaaatcctcatgtcctggtgtatccaaaatgttcacacgttttccttgataatcaaattgcattacagaactagtgacagaaatcccccgttgtttctcgatttccatccagtcggatttagcaaaattaccggttttctttcctttgacagttcctgcttggcgaattgctcccccaaatagcagcaactgctcagtgatcgttgtcttcccagcatccgggtgagaaataatcgcaaaggtgcgacgactttcaacttgttgttttaaatttggattctccatgttatgtagttactccattccttgaaattagaactctctgtgtctatacaaagattttctgaccaaatcagtatatcatgtatcaagagcggaaaaaagaaaaattacagacaaatgctctctatcattcagattcgaaagtctagagagcaactgtttaagcagcttgatagctatttgtatttatacgagaactgctgtgaaagcatgaaaaacactcaaaaaactaaaaggctggaattaatgtatcactatgctcattttccaaaaattctttgactttatcgctggtcatcgcttttcgcaaaacattgattttttctgaatcttgattgtccttacgagcaactaaagagatcgcaaaacgatcatctatcgttttctctaagaacaaggcatcgtcaggctttagaccaattttggcgatataggtcggatagttgtagacaagggagacatttggttcattataggcttctgctagattcaataagtccacagacaaccattcaaagtttttaggattcgcagtaatgtctttgatcgtaccattgactccaactccatcttttaattcaatcaatccttgctcagctaagatggctaatgctcgtccttcattagaaacatcattcggcagagcaactttcgttccttcaggaatgtcttcaatttttgtatactcttttgagtaaaagcccactttagcattataaattttgtctaaagccactaaatctgctgatttttcctcattgtagcgttgcatatacggctcatgctgcgcaaagtttgcgtctacttccttattattcaacagctcattgtattgaatattgtcatttacttgtaccaattcaattttccagccatcttctaccgcatcggctgctactttgacaacatctgtcataggggtcgtttgagaagcgactttaatcactttatcctctgattgcgactcattccctgttccacaagcaccaagaaacattactgctagtactaacccaaaaaatattccttttttcattcctactcctactttcttttatcaactttttttgctaacccattcccaatcaactgaatactaaaaactgctacgatcatcactaaaatggaaaaatacatgaccccatattcgtaccgttgatatccataacggatggcaaagtctccgattcctcctccgccaacgattcccatcactgtggaataagacaccatactgacgatcgttgtcgtcagagacaggattaacccgcttcttgcttccacgagcaaaaattctttgacatattgataagtggagacacctaatgagcgtgccaatagtccgacatcttctgggacatccaacaatacctgctcgactaaacgagcatagatgacgattgacacaatactcaatgggatacttgctgggatcggcccaaacgagctgcctaacaaaaaacgagtgacgggaatcatcgcaacaacaaacagtaaataaggaaacgaacgaatgaccgtgatcagcaaatttaatatttgatacaaaatcgttccctgattgttgttttcacgactaataaataatagaatacctaatggcaatccaatcaaaacagcggcgaagatagagatactcatcatgatcagggtttcttccatcgcctgcatcaattctggtaaatagtattgaatactctcaattatcgtcatgctttagactccttatcacacgatcgacatagtttaattcttctttttgtaaaagatgcggcgtattcgctacttccgctacgattcttccttgttccataacatagacccgctcacaaacttgtcgaaccgctgacaattcatgactaacaaacacgattgtaggctggaaagtgccatgaaccttttgcaataacgataaaacatctcccttagtatcttcatccaatgcactggtcggttcatcacacaagaggatctttggttctttgaccaaagcacgggcaattgctactcgttgcttttcccctccacttaaagaagcaggataaaccgaagccttttcagacatacctacgaagtctaacgtttccatcacttgtcgttgtgattttccagctaattttaaaggcaaaaaaacattgtcgtagacagtcagattatggagcagattaaattgttgaaagatcatcgcaatatcttgctgtagacttcgtctcattttcttggtcaatcctgtcgtgttcacgccatcaatcacgatttcgccagctgaaggagattcgatcaaattaatcagacgcaacaaggtagacttcccggaaccgcttttgccgacgataccgacgatctcattgctgattgttaacgatactcgatcaaggacattgtcctgatatacttgtgaaacctcttttacttcgatcatatttggttcctgacgctcctctgccttcaaactcaattgaaaagtagtgatacaaattgctcatttgtcagttgatggatatatttcgcgacttccatcccttgaaaatgctgccgcaactcttcattataaggaagaccaatcagctgtttttcgagaccagcgatatcttcttcgccaaaaaaatctccagtgatttgtgcctctgtgattttcccctttgccactgaaaagcgtagttcaacgataccaacattttcaaaacgtttgcgtttcgtccattgataattcggggcttccccataaatccattgatcattggcatatcgcaattgatacaactgattaatcttccgttgatcttcagccgttaatttgatttctttttcttggatttcctcaatgttgtcgacgtcataaatatgacagagcaattgatctctaaattctttcgttgacaattgttgatattcttcagaaagataaggcttgatgttggtcacacttttacgcactgactttgttgccttcgagtcgatcttttcctgtggaacgttcaacacttttgtcaaaacgcttaagtcaacatcgaacatcaatgttccgtgggaatagcttctgtcattttttgtgtacatggcgttaccagaaaatttctttccttcaacaaacaagtcatttcttccccgtacttcaacctcttttgctcccatcttctgtaatgctttcaaaataggttgggtggctccatgataatcaccaaaatgagtcacatctttcttagtcacaaagctaaaactcatgttgcctagatcgtcataaactgctccgccaccagaggttctccgggttaaaacgatgtcattatgtcgtaaatagtcaaaatttatttcttcgtaggcattttggtttctaccgattataacacaaggcttttgtatgtataacagcaagcatggttctgaaatatctacgttattcattaaatattcttcagtagctaagttcatccgaatatcatcacttttcattcggtaaaatctcattttcccaccccacaatgatttctagttatcgcactcttatcctctctttaattcacaagaaaagcaagaaatatgcttagttattttagtttttttatctagctaaatctgtatcatttgattaactcattctgttatatattatttttagacaaaaaaatgcttgaagcatttgcttcaagcattcattttatcgacgaggttcgtcttcttcaaaatcttttttgaaatagcggcgttcttcttcaggttcgacagctgtttcttcaggatcatggaagataacgcggatcttcaatacacgtgacccttccatttcttctgtaatcagtgtgacgttatccactttaaaggataatttctctccttcatcaggaatcaaccctaaagctgtgatcaaatatccggccattgtatcaacatcactcatgtgcaggctcatatcaaatgcttcattaaagtcatcaatcaacattcgcccttggatgatgtactcatgatcagaaacttgttcatataattcttctacttcatccgattcatcgtcgatctcaccaacgatttcctctaagaggtcttctaaagtaaccagacctacgacaccgccgtattcgtctaataagatagccatctgattttgagtctttttcaactcatagagtaagtcatcaataaaaacagtttcaggcacaaataatggttcttggaggatttgtttaatatctaatgtttcaaatccatatttataggcacatttcagcaggttttttgtatgtaaaatacctacgactttgtctttgtcctcattatatactgggattcgagaatagttttctgctaaaatttctgtcaaaatttcatctactgaatcattgatatcgaccataaatgcagtagtccgcggcaccatcacttcacgggccaccttcgtatccaatgaaaagattccttgtagcatttccaattcatcttcttcaaagacaccttctgtttctaacatataccgcatttcatcacgagtcatttttgtatcttcatcatcaaattccattggtgtgattcgagctaacaaactagttgaagcggaaagcaaccacacaaatggttttgcgatcgtaccaatcacacgtatcacacctgaagtaaattgagcaacttcttcagatttgttcattgcgattcgttttggatacaactcaccaaatacgatcgaaacataggtcaaaatcgctaatacaatgatattagccaggctttttgctgcagctccgccacctagaacgggtgctaagcgggtagatagcgtatctgccagtgaggcccctgataagatattgactaatgtgatcccaacttggatcgtcgacaagaagttggtgggattgtcaatgattttcaataatttttgtgatttgacatttccttcctcagccttctgttctacacggttcttattaactgaaacaaccgcgatttctgaagcagccaagaaagcattgatcaatgtcaaaacgatcaataataaaatttgcgctaatagcgactgactctcggggtcagcattcataatagcattctctccttatttttacattttctaaaaaaaatcgtgggctatacccacgataaaatcgtatcataaagcttttttctttgcaataaaaaccatcagttatctagttcgatcaatttctcttggtttttcttgcttttatcgtcacgaatcaaacgaatcacaaaaatcacaatcgtacgacaaatggcgtagaaaggtactcctaagaaaatacccagtaatccagcgatgttccctgcgactagcaacactaaaataatggttagcggatgaatcgccaatgactttccgattacattaggatagatcacattaccatctaattgttgaacgactaacacgactacaccacataacagagcccggaaaggatcatcaaagattgtcactaaaactgccggaatcaagccgaggtaagggcccaaataaggaatcaagttagtgatccctgcaatgacaccaaataaaaaggcgtaattgacacctactagccagtagccgataaaggtaaaggtcgcgacaaaaatacattcaatcgcttgtccgctaatgtaattggacaatgttttattcagatcacccaataactcgatgatttgatttcgtcttttttcaggtaaaactgattgaatatttggcacaagtttctcgccgtctttcagcatataaaacaagatgaatggtactgtaacaatgatcatcgttgctgaagcaatcgttcctacgatcgatcccaaacttgttgacagcccacttagaaattgttgcagcaatgaaccataggaaagattgagattttctaactgttgcgcaaagtcgatctgtttaaatactgggtcatctgctattttagaaatccaagtctccatatttttagcaaaagtaggaatattttctgcaagttgtgaaatttggttgatcagatttggaatcacgcttacgactgttaggacaatagctgctactaataagagtaaaactaaaatcacagcgtagattcttttgatcttagtggtcttcatcagaaaaacgacgattggattaagcagatagtacaaaaagcctgcaattaagaccggcgcaaataatgtcgaaaaaaatgttcctactggtgcaaataagaaattgattttgctcaataccagagctaacgtggcaagaacgagaatttctaatgaccagaagaaaagttttgattgtttgaatttgtcgaacaaacgattccctcctttttttcactattatagagtattttgcaaaaaaaagcttgcgactttagccgcaaaagcaatttttcttttcgtaaaaatggtatacttagaaaataattgatgaaataagaaggtggttgattttatgttcgtcgcacaaaccaaagatacattaagcgaaatttatctggactcgttgaaaattcgtaatgatgtcttcgtcaaagaacaaggcgtgcccttaagtcttgagatcgatcaggacgaagcaaacgcggtccattttgttctctacaatgaacaaaaagaagcaacagcaactttgcggctgcttcctatagatagccacacattgaaacttcagcgtatggccgtacccgtttcccatcgcaaaaaaggcttcggacgaattttgatccaaggggcggaggattttgctcggaaacaagggtttcaaaaaatcactttaggtgctcagctaaccgcaaaaggtttttatctttctctaggctaccaacctgaaggggaagaatttcttgatgcggatatgccccacatcaaaatgagtaaatatctgcagaactaagtatcttaaaagctgtcaatcacttataactcacgtgattgacaactttcgcttctttatagaactggatgaatctcctttaaagaagccccgccttacaaatcaatcactcgatgacaggcactattttttgatacaaaaagactcgacttcgaattaaagtcgagtattttgcacattgaagtgaccctttacggctactccttgctatttctgagacaactgcttgtagcgatcataccaaatgtccacatacccctcagaaaatggtcctttgccattattgatccaatctactaaaattttgacattttcttttaaaataaaatcaatgtcctgcggataatgcatgatcttgctatgaagctcatattcatccacatctagtaaacgtttctcaccatcaggaaatactttgatatcaaggtcataatcaatatatttcaaggcctcttcatcaagcaaatacggtgaagcgagattacaataataggaaacccccttttctcggatcattgcgattacattaaaccagtattttttatgaaaatatacaatagctggctcacgggtaacccagcgtcttccatccgattcagtcaccaatgtatgatcattgacaccaatcattgagaattcgctcgtctttaagaccatagtatcccgccacgttcgatgcaaattgccgtcatgtttgtagctttggatgctgacaaactctccttcttttggaactcgcatagcaacccttccctcagcaagaaaacttgcgttttgtttgggtgttcattacaccgatatcgtaaatattatagcaataaaacaaccctttgcctagaaatgtttatcgactttatgatttttcttcaattgttcgactaatttcaactgaggtttgggaaagacatactgttcaaattcttctggcgcagcccattgactgtgttctaacgagaattccgacggtgtgcgtccataaaaaagcagtatgtgccatttcaaatgactaaagatgtgagtaacctcaccaagatgtcttttttgccaaacgacgggaaattcagggaaaatcggagctggttcttctgcaactgcatccaatgttaactgttggtcttgccaataagccaataattgcatataggtcgcctgatccacttccaaaagcggaaaatgccacattttggctaacaagccagtttctggtcgctgcaccaataaaaagcggccatcttcttcaatagctccagcaatgtaatacatatcttttggcttcgctttttttgattttacgggaaagtcggtttgtgttccctgctgataggctagacaatattcttgcagtggacattcctcgcataatggcgaagtcggcgtacaaatacttgaaccaagatccatcaaagcttgattgaattctcctggctcatcgtgagaaatgattgtacgcattgctttatcaaagactccgcgagaacttgctttagctatatctgcctcaatacaaaacaaacgactcactacacgcatcacattgccatcaattgcaggttccggcaatccaaaagcgatactgccgatcgccccggcagtgtaaggaccaatcccctttaacgaacgaatatcagtgatggtctgtggcatctctccatcgaactctgccatgatttgttgagcggcagcttttaaattgcgtgcacgagagtaataacctagtccttcccaagccttcaaaagcttctgctcttctgcaccagctaaatctttgatggttggaaattgttccataaagcggtaataatagccaatgacggtgtccactcttgtttgctggagcatgatctccgagatccagattgcatagggatcgttggttgctctccaagggagattccttttttcatcatggtaccaattcaaaaacttgtcctggaaagaacgaatgtcctcttttgaccacttttcccactgtttattcatccataacttcctcatctaaaaattgttggatcgcatccagagcgaaacctttttggtaaagaccttgtttgattttcatttttcttttattcaaaggcaaccgctgatgtcttcgcaaaagtcgttgaccctctttttgcaaagctgcgttttcctcttcgtcgcctctatctgtaggcagttcatctaaaattaattggataactggttgtctaaaccctttttgcattaggtgcagcgatagtttctgcatcatctctttgtgacttttcccttggaaccgacgcaatgctttttcggcagtatgatagccgacatcaaattgcttttcttctgtatataacggcatcacttcttgaatcacttcttcagacagccctttttgttttagttgctgactgatgactgatggccctttgtctcctaaacggatttgtgtccgcaagtagctttctccgtagatacggtcatcaagtaaatttagttctttcaatcgctgcacgaccaaatggcgatcctctaaattgatttctttgtcttttagataggtacgaacttctttttcggaacgtagttgatagctaatgtaattcattgcttgctgcagcccaatatcaaaaccggagctttttttgatttcggtcaactcttcttccgtcacttcttttccttttagaagacggaaacgaaccagaagatcctcagaaacccgcaaagattctccattggagcagtctacttcgtaaaagggaccttttcccttactgatacgaatgatcgttatcattttcttcacctcacgaacgtatattctagtttatcacaaaaaaggggaaattccttcaaaagagctataaaaagtatggtaaaatagagagactatttatcgataaggagcaatcatggcaaacgtacaacttaaaaacggtcaaaaactacaactgacgatcaaacgtttaggaatcaacggagaaggaatcggctattataaaaaattgatcgtctttgtcccgcgagttcttccgggagaagaagtgattgcagaagtgaccaaagcaactccgaggtttgcagaagcgagaatgaccaaaatcatcaagaaaagcagcgaccgtattctccccccctgcaaattttatgatcgttgtgggggctgtcaattacagcatcttgtttatgaaaagcagctagactttaagaaagacttattaaaacaagcattaaccaaatttaagcccaaaggttatcagaagtatatcttaaaagatacgattggcatggaagaaccatggcactatcgcaacaaagcgcaatttcagttgcgatatgatacaaaatcaaaacgaatcgaagctggtctttacgaaatggattctcatcgtttagtggcgatcgatgattgtctcgttcaagaaaaagcaacccaagatgtgatcaatggccttgtgcagttactgaacaagtatcaactcccaatctatgatgaaagaaaaaacagcggcatcctgaggactttgatggtcagagtgggcagagcgaccggcgaagtacaagtcgtttttatcacgaactctagcaaactgccacagaaaaatgcgttgattcgagaaatcaatcaacgcatgcctcaagtagtttcgatcatgcaaaatgtccaaagcaagaagacctcggtgatcatgggggatgaaactttacatctctggggaaaagaagcgattgaagaacgattgcaggaattaacattcgacctttcacctcgtgcattcttccaactgaatccgcaacaaactagtatactttatgacgaagcaatcaaagcactggcattgacaaaaaatgaaaccgtcgttgatgcctattgtggtgttggaacgattggactaagcctcgcaaaacatgcaaaggaagtccgtgggatggacatcattccgcaagcaatcgaaaatgccaaagaaaatgcccgccgaatccaagcaaataatacgcattatgaaacaggaactgctgaagacttactccctaaatggtttgctgctggttttagacccgacagtattgtggttgatccccctcgaactggattagatgaccacctgttgcaagcgttagttgctcagcccccaaagaaaatggtttatatctcttgtaatgtttcaacattagcccgtgatttggtcaaattagcgtctgtcttcaagattgagtatctacagtctgttgacatgtttcctcaaactgctcgttgtgaagttgtcgttaaattgacgcgtatataaaaagcctagccatcttcaagtaaatgaagatggctaggcttttttaggaattcagctagtatccaaacacacattgttggacactagctggatcaaatcttattttgtgactaaagcatcaaggctggctactgccaaactcattttggcgatcttatccaataatgcaaaacgattgcgacgtattgcctcgtcatctaccatgaccattgtctgatcaaaataagcttcgattaatggtctcaatgaaactaggctttgatagttttgttccatcgtttgttgcgggaacttatcttcaatggcgaccactgcctcataaagcgtattttctgattcgttctcaaacaattcaggattgatttgtttgtgttcaagatctgcctttttcgcaagattaatgacccttgtcaaagcttccatcgaaggtttgaaatcagaatcattcaaatgtgctctcaacatttgagcagcttcaaacaaaagactgatatcgccttgacgagagttgatcactgcttcgatcacatcatgacgaatgtttttcgttgctaagaattgacgcagacgtccgtcaacaaaatcaatgacttgctcttgtccttcgttcaattgaatgccatagactgatggctgttcattgattgctgtgcggattttttcctgtaaacgggctaacgggaagtaccaacgtttctcagcaataatccgaatgatgccataagtttgtcggcgcaatgcgtatggatcgttcgatccgcttggaatcatgcccactgcaaagaatgacagtaaactgtctaacttatcagcaattgctaaaattgctccaacgcttgattcaggtaacgcaccttcagcagagacaggcatataatgttcacggatcgcttgtgccacttgcggtgtttctccttgcaagagagcatacttttcacccatgactccttgtaattccggaaactcaccgaccatattcgttactaaatcaaacttatagatttctgatgcacgtttcaattctgttctttcatcttcagacaattcgacggtttctccaatgatttgagcaataacagctacccgttgcattttttcatataagctaccgattttttcgtggaaagtgacttgttttagtttctccacacattgatcgatggtaagtttcttatcctcattgtaaaagaattccgcgtcttctagacgcgctgtcaatactttctgatttcctttgactacattatcgatttttacccgatcgccgtttcttgctgaaatgaaatggggcaacaaaacaccttctggggtgcgcacatcaaaataccgctgatgttctttcatcgaagtgactaagacttcttctggaactgaaagatatttttcatcaaagtcaccgacaaaagcagtcggatattctaccaagttgttcacttcttctaaaagatcttcatcaagatcgatccgccagttgttttctttagcaattgcctcaatttggtctacgatcaattgctgtcttttggatggatcagcgatcacgaattggcgttccatttgactcaaatagtcatcggcagtttcaaaggtgacttcttctccaaggaaacgatggccacgggatttccgatctgttactacgtcaagaactgtaaatggtacgacttcagcgccaaacaatgctacgatccagtggattggccggatatactcaaaatcgaaatttgcccagtgcattgttactgggaacaccaaactagtaatgacctctttcaaaccagttaaaacttcaagcgctggtttaccttgaatatgcttggtgacatagacatactccacaccatttaattctttgaaggtaattgcatctgtggtcaatccttgtccacgaacgaacccttgggctgcttttgaccaattgccatcggcatcgattgcaatttttttggcaggtcctttcacttcttcttgcgtatcagcttgactttccggaatcccagtcacatatacagctaaacgtcgaggtgtagaataagcttcgatcgaactgaattgcagtgcatgagctgtcaaaaactccgccgttttttgttgtagctgtttcatgcttggcgtgacaacatgtgctggcatttcttctaaaccgatttctaataataggttttgtgccattttatttccctcccgcaatcaatttttccgcttcttctggtgctaataatggataacctagtttttcccgttcagcgacaaataacttggcaacttgtcttgctaaattacggatacgagccaaatatccagcacgttcagttaccgaaacagctcctcgagcgtctaacaggttaaatgtatgactgcatttcaaaatatagtcatatgcaggatgaacgaggttttcatcgatacagcgttttgcctctgcctcaaagcggccaaaattgcttaacaataactcttgatcgctgacttcaaaggaatattttgaatgttcaaattcaggctgacggaaaatctcgccgtatttgacccctgtcgaccattccagatcatagacactttcaacttcttggatataagatgctaaacgttctagtccataggtgatctctgaagtaacgggtttgcaggccaatcctccaacttgttggaagtaagtaaactgagtgatctccatgccgtctagccaaacttcccaacccagaccagcacaacccatagaaggattttcccagttgtcttctacaaagcgaatatcatgttctagcggatcgatccctagcaaacgcagactttcaaggtataattcttgaatattttctggagagggcttcatcaccacttgaaattgatggtgctgatacaaacggttgggattttctccataacggccgtcagccggtcggcgagacggctccacataggcggcgttccaaggctccggtccaattgcacgtaaaaaagtatacggactcatggttcctgctcctttttcggtatcatacgcctgcattagcatacagccgttatcagaccagaacttctgtaaagtcaagatcatttcttgaacggttaatttactcattattttcttcctttcttacaacgcattgactactggataaaattcaacaacatgacctggaatcaattttacttcaacaacatggtcatccgtcaaaacatctgacaaatcatacaacatttggtccggttttgttgttaactctttgactagttgatcatcttgcttgactaagatttgcaatggaatacttgctaacacttttaattttttttctttgaattctgatgcagcaatcgtcatatcaaatggcatgagagtcccctccttttctaagtcattgattctaccgcaaaggttgagtttttcatgaaataggacacaggtactacgttctccctgcgagcctactgtttcacatctgctcgtctcttctgtgttactcctgcagtcacttctaccagcagggttcgctaacaaggacttgtatgtcctgttttacaggtcgatcacagtgattcgagcaatggtgaaccacaccaaaaaatccctatacctatacttgcgcatagatatagggacgatattctcgcggttccaccctacttccgattactcggcagcttcattgagtcatactcccggatgcctgcgaaaaaaggattcaacttggctttcactatcccaagctcgctggatgactctggcttctttcttttttccgatcaacgtatttatttgattatccttatcatagtagctgtatagggactttgtcaatcaaaaaatataaaagcaattaattagggcctaagtccggctgatcgtgaaagatgatcatatctgatacccgaccgtcactttcaaaaatcacagcctcgttgtttccttctcgtaaataaggagctggaatatataaccgtctttgcggtcctctctcccagaaacgaccaatattatgcccattgatcacaataaatcctttgccccagcccggcagttctacaaatgtatctgcgcattcatccacttgaaagctcactttggagaaactcggttgtcccgtttgccagtgaccggaaaaatctacttgatcaagattatccatcggtagactgtatatttcccattcactttgaaacgcaccgttgacgatcactccgtctttgatacctttgtattgatgattcatttggacggagtaattgacccgtcccatgttctcaaccaagatccctaactcatttgactcctccgtcagtgtgagagtcttcttttgtccgatttcctgatcatattgaataaattgcagctgattattaataaacgtatgggctcgatcctgacaatggatcagtcgatagtcttcgatcacacgcgatttgccaatttgcgaacgataatagacatagccagtagcttgatctaacagttccatcgttaaaggataattgtgcttgactggttgactgatgctagctagtgtctcaaagagagaaactcgctgactaactttccagctaccataagcccgtttggtgatttttgtagtcaaaggaaaggatgggatttcggtaatttcacctatgacttgttgaaatgcttcatacttaggtgtcacatcgccccattccgataacaacgcatcatagtcatagctagtaacgtctggtgataatttctcataatagttggcaccattcataaagccgaagttcgtgccaccatggaacatataaatattgacggagccagcttctaagcagtcccgcaattcattagcagcgtcggttaccgatgtggtatggtgcttgtcatctccccatgcatcaaaccagcctatccaaaattccatgaccatcaatggctgcttcttcccatggaattcttgaagttttctaaaattctcctgaatgtctgatccacagttgatggttggcagtgcgatgtccttgatcgaaccgttctctaacatatccagccaaggaccatctgacgtaaataagggcacgtcaatgccattgtgacgcattagttcagcagactttcgcaaataacttttgtcatttccataactgccatattcattttcaacttgcatcatcaaaattggtccttcttgagtgatctgtaaatcactcacttgagaaaaaagctgtgtaaagtatcgagcgatcttttccataaacggtggatagtcaaagcgaatcttcatgaagggatcttttaacagccaataaggaaggcccccgaattcccattccgcacaaatataaggtgctggacgaaggatcacatacagccctacctcctgtgcaagctgaataaagcgccgcaaatcaagattatcgctaaagtcaaactttccttcctgcggttcatgcatattccaaggcacatacgtttcgactgtattacaacccatcaaacgtaatttttctaagcgatcccgccaatatgcaggcacaactcgaaaatagtgtatcgagccagaaataattttcatgggctgatcatttaaataaaattcgtctttgattacaaaagcagtcattcgcttcttccttccttgattacatatacactgtattgatctgcaacggagtcttcagtcaaatgcttaccggacagtaggtccttctttcctacaaattgtgccggcaccttttgcgcttgcttctgaaaattgatgataaaatagtaaaccgcttcttccgtatgacgacagctgatttctagatttgtttctccttcaatcacagcagttagatttgcgctattggttgcttcatccaagatcgtatctaaaagatctttttcaagttgagtcccaatataataaacgacccctttaccaaatcgatttttggtcactgctggtgaaccggcatagaagttactcgtatagtccgctacagattcagcggtctccaaatggatgatctcactgactaagttactttctccctgtcttcccccctttaattggataacgttcgtctgctctggtgctaatgcatcaatctcttctacccagattcctgctagctctcttaaaggcccagggtagccgcctagatggacattgtctgactggtcaacaatgccactcatatacgttgtgatcaaggtgcctccttgttccacaaaggattcaagagcttctttcatacctgcttttaccatgtacaaaaccggtgctaccagcacttggtacttgctgaaatctgcatcaactgacaccaaatctgttgcgatattcttttcataaaagtaacgataatattgatggatttgttgcacataagtcaaatcaactgttggtccgctcgtatattccaatgcccaataattatcccaatcaaatagaataccaacttcagcctttgtttcactacccaaaacttcgttcagtcggctcaattcttctcctaatgctgcagtttctttaaatacacgggtgttctcatgcccaacatgttctatcaccgcaccatgaaacttctcacaagcaccaatggagcggcgaagttggaaaaactggattgtatctgctccatgagcgatcgtctgatagctttgcgcgcgcatttggccaggttttttcaatgaattatatggttgccagttttgttgggatggtgtttgttccatcaacataaatggcgcttgcttcaatccccgcatcaaatcatgagtcattgcaacgaaactccatggtgtattatacgaaggatagttgtcccaagaaacaatatccatttcttttgcccatttgaagtaatcgagtcctttaaaagttcccatcaaattcgtggtaatcggtgtttgactatcgaattgacgaatagcattccgttctaacttaaagttttctaaaagactgtcagaattgaaacgacgataatcgatagaaattcctgcaaatgcggttttgtcatgaccgattccttcagaaagagcattcggcagaacgatttcgtcccattcataaacagtatgcccccaaaattccagattccacgctttattcaatgcctcaagggtttgatacttatcttttagccagacccgaaaagctttctcacagttttcgcaataacactcacctccatattcattattgatatgccaacaagtgacttgcgggttaccaacatagcgttgtgccaatttcccagctaatcgttgtgcatatttttggtagactaagctgttaggacacgcattgtgccgctgtccaaatttatggtgccgcccttcatagtcagttcgagccacttctggatagcgcttgaacatccatgctggcaacgccgctgttgaagtcgctaatacaatgtcgtagccttcttcactcaacatatcaatcatctcatccaactcattaaagtaataatcgtgctctgaaggttggatttttgcccaagaaaagacattgatagttgcactattgatgtgtgcatttctaaaaattcgcatatcttcttgccagatttcttgcggccactgattagggttataatcgccaccgaataaaaaccgttcaaaaacttttttcatgtttgacgctcctttttctcattgataattattattgtaaggcttttcaaaaagttgtagtataataggattgtcatgattctataatatttcgaaacaaggagaattcaatgtctatctatttctatcagaacaaccctcggctccctgtcagtatcgagagcattgggaatcattgggcacaagatgaagtggttcgccccactggttatccatattatcactggttgcaaactaccgctggccaagggaccgtcctttttaacgatcaatcctttgtgttaactcctggggctggcattttgattttgccattcatccctcatcgttaccatcctcatagagactggcagacaaactttgttacgctgcaaggagatttagtacaggaactgttgaaaccttttggcggaaagcgctacttgatggggcaagatagccctttattttcttatagtgagtggatcaatcaacgaatcagcgacgatcaagaaaaaatattagacccattgcgctcttccagcagttgctatcactttcttttggcattgatccaacaacaaaatgctgacgcaaatgaaaagcatcatttgtaccaacgctacattgcgcctgtactactagaaatcgaaaccaattatgctcatccattgaccgtcgctgaacttgcggaaaaaatttttgtaactccgcagtatttgtcgcgtctctttcagcgctttttggggcagtcaacctcccaatttttgctgaattatcgcctgaatcgtgccaaagaattattggtaggcgagcctcatctggatatccaagatgtcgctttcttggtaggaatcccagatgcaagtcatttcactgctcttttcaaaaaaaaagttggcgctactccaaagaagtttcgccaactttatcgttgatctttgggtttcaggatatcttgccactgtcccatttgatcaataaattttttgcttttcaaatgtaagccaacatattcatcatacaataaatcaattacctgacgaatggcttgcttcgtttctggttttaacttgatcgatgcgatttgttcataagagatttgtgcaaacaaacgaataaaatggattgcccttggatcaccgtgataacgatggtcatctaaggcccaatgcttttcgcatatgacgccattgtatttcgaggagtaatcaaagcggccttctgtttgtccgcagaccgcacagtgggtccatatcggtgagaccccaaaacgctgcagcaactgaatctcaaaaatattagtgatgatctctgcatcattatcagtatccatcaactgcaaagcttcatgtaagaaatgatagagatttggatcgtacacgcggtcatcgatcgcagagtcagccagattcaatagatacgtagcatagcctgcaagaaaaatatcaccttggattttgcgaaaagaatggatatctttggcattattcaagaatgacaagccctcagaacgaatatttccaatataggtcgcttcagtgtacgaaagcaaagctggcgttaaaggattattcttgcggtgggcaccttttacatagaacatttgctttccagccgattcagtgaatattttgaccagtttatctttttctttatggtccctagtaaataacaagatcccttttgtttcaactaaattcatgaacaacgctcctttctaaaccagaaagctgaagcagctcaatccccttcgcttgctccagctttctttgtcttttctctcatcaaacttcttagctgatcttgtttagagaagatcagtaatcatcgttccgataaccgtagtctgtcaggaaggtttgtttgtctcgccagtctttttgaactttgacccataattccaagtaaactttatcgtctaacaaatgctcgatatctaatcgtgcttttgttccgatttgtttcagcattttgccgcctttcccaataatgattcctttttggctatcccgttcaacgacgatcgttgcttgaatatgaattttatcattttcatcccgtttcatcgagtcaaccaccacagcgactgagtgaggcacttcgtctctagtcagtaacagcactttttcccgcactaattccgaaacgatgaaatattctggatggtctgtgatttgatcctcaggaaaatattggggaccttccggcatttgatcaatgactaatctcatcaatgtctcaaaattatttccttccgttgccgaaatcggcacgatctccgcaaacgtcatttgagccgcataatcttcgataatagctaaaagttcgtctggatgtactttatcgattttattgatgactagaaagaccggcgtctcgtttttccgcagccgctcgataatgaagtcatcgcccttcccccgtttttgatcggcactgatcataaataaggtcacatcgacttcacgaagtgcactataagcagtttccaccatgaaatctcctaagcgatgttttggcttatggattccaggtgtatcgataaaaacgatttgtgcatctggtgttgtgtaaaccccttggattttatttcgggtcgtttgtgctttgtcactcatgatagcgattttttgacctactacgcgattaagtaatgtggatttaccaacgttgggccggccaacaatggcagcaaagcctgatttatgtgttgtcataggtgatctcctctgtgtattatctttctaaaagaacgctaaaatttttggtataaaaatgattgccgcaacgatcaatgcaaagaatgctgtcatcaggactgctcctgccgccatgtctttgatttttttgccaatgggatggaagtgaaaatcggtaaacatatcaacgacattttcaaagactgtgttgacgatttccacgatccaaaccaaaaataccgacaacaacaaccagagccattccatttgatttaatctaaagacaaatcccgcaatgattgcaacgatgcctaacaagacatgtttgcgcatattgcgctcttcgtcaaagacggtcttgattcctgtaaaggcaaattcaatggatgtgataaattgtttgtttttttctgtattcttatcttttgagtccataggcatccaatatttccttttgcagaccgaacatttctttctcatcttctggtgtcatatgatcataaccattgatatgcaaaaatccatgcagcgctaaaaagcccaattcccgatcatagctgtgtccatactcactagcttgctcttttgcccgctcgactgaaatcatgatatccccaagatttctcggcatagctggcatttcatcatcaaagatgatcggcaactcttcttccgtttcttcttccaaagcaaaactgatgacatccgtcggttgatctttatcacgatagtcccgattgatgacttggatagcggcattgtccatgaaggtgacagacatttccgtatcctcaggcagcttcaaatagtctgccgcatactgcagcagttcatcaatttcattgattttctcttgactcactgtatttgtttcatctaaaaaagcaatctccattaccgatctcttctttcttgttcttctttcattttttccgcttcggacttcattttcggatatttgatccgtgaatggaatgtactacacaatccattgactaaggacttttcaatgatacgaatttcatgcaatgtcagtccggactcatctaattgtccatcaagaatccgatcattgatcaaattcgaaacaaattccttgattttctgatctgtgggattatccattgcccgcacagcagcttcacaactatccgcgatactaacgacccctgcttctcttgtttgtggttttggtccaggatagcgaaaatcggcttctgtcacttctggattacgttctttcgctttgacatagaaataacgcatcaaggttgttccatggtgctggcgacaaatatccaccaccatctgaggcattttctcattttctaaaagaaccgctccatcgatcacatgtccgaaaatgatctgcttgctgtcttccggaagcaaaaagttatggggattttcagcccctgcgggtaaattctcaacaaagaaattcgcatgctttaatttaccaatatcatgatagtaacaagcgacccgtgtcagtaaactttgtccgccgatctctgctacagcattagcactcaaattggcgaccatcatactatgatgataggttcctggtgcttcttccagtaattgtttaagtaacgggtgatttggattacttagttcgttcagaacgatcatgctattgtctgagaccaataactcaatgtattgatgcaaaccaatcgttagtagatagctaagtaatgaacccgctaaggcacaaatgatcgtcgtccaggtattgcctctcgcgaaatccatcccttggaaaatcactaacatgacacttaataagaacggaaagacgatgacccacataatggctgttcgtccttgactggcgattcgttcccttctgatcatcgttcccatcaatccagagaacaaataggttaccaagacagtagtcagcatattcgtaccgctggaatcaaaataaatgaaaatcgcattgattacttgaaacatcgcagctaaaattcccaaacgccgacttgagaatatattcaagatcagcggggtaaaggcagctggaaagaataacggaatgaacgcgatgagttcagactgaaatagttggaaaaacttcatcaataaaatactaaaaatcatcgcaatgacataaaaggtcacagcattcatccgtttgtcttcgttttttgtctgccgtgtgtaataaaagagcatgagcatctgtaaagcagcagtaaaaactaaagcaatcaacggaaatacagagaaggtttgactcgtcagaccgagaagctgcaatttttctaatgcatttgaatcaatctgcgagccttcccggacaatgatctcaccttgatagatcataacaggctgaacagcgtctttggcagcctgccgagcttcttccgttcgtttctcattaggaaaatcgttgacaacgatcccttgattgactaaaaagcgtaatgctgttgccatttcagaagttacatccaaaaactggatcttttcttcggcttctgatcgaaaagtactcaattcagattggcggatctgtttagccatttgttcatcaacaagctgcagcgcataatctcttaccgtgttcagctgatcactattcaatgaaaacaatgtcgacaaaaaattattggtcagcgcttgataaaaatcaagttcatcatcactcattttttcaaattctttttttaaagtggcgatatactcttctgtatccggtttaggaacattttcattttcaccagcagctttgaccgcagcttcatatttcgtattgacagtcttgttgactgtatcaatcaattcaaacaaatgattgatccgttcatgttgaacttgtgccaaatcgtcttgatacgtgtattcaggcgagacggcttcagcggctagcgtacgtttttgttcagtagcagttgtgttttcaatcgttttgttggctcggatattttcttccgcaacctgcccctcgctatagtcgacattgttttgttttacactggaaaacatgatcccaatagataaaacaaaaaagagcaccataagcagcggcaggtaaaagcggcctaatttttctcgaaaattccgtaacggttgtatgatcattttacccctcctgtccgacaatcaacgttgttctttactatcggattcctcataggcacgtataatgtctgcaacgactggatgacgaacgacatctcctgcttcaaagtgcgcaaacgcaattttaggaattgcttctaacgctcgttgcgcatgaatcagtccgctcgttgttccttttggtaaatcaatttgacttgtatcgccattaacgatcatttttgaattaaatcctaggcgggtcaaaaacattttcatttgggcaatagtggtattctgtgcctcatcaagaatcacaaaagcatcttccaaagtccgccccctcatataggctagcggagcaatctcgatcacgccgcgttccatcaaacgattggtatgatccataccaaagatttgataaagggcatcataaacgggacgcaaatagggatcgactttttctttcagatcacctggtaaaaagccaagattttcacctgcttcaacagcgggtcgcgtcaagatgattttttgaacttgtcctttcttcaatgccgcaatggccatgacaacggcaagaaacgtctttccggttcctgctggtccaacgccaaaaacgacatcatgggttctgatggcttcaatatatttcttttgtccggcattttttgcgcggatcggcttaccgttacgatctttgatgatttcttcttcatacatatctgtgaaataatctaagtttcctttatttgccatgttcaatgccgtaataacatctggcgtactgatattgatccctcgtttgatcaactcttgcaacgcatggatcacggattgggctttttcagcggctgtcttttcaccaatgatttggatcatttctccgcgggtatgaatcgttgtttgtgtagcatcttcgatgactttgatatgtttgtcatgggaacccaacaacaaactaatatcatcattttgagtcagttggatttccaaagaaatacgctcttctgtcaaataagttacagctccttttttaggcattctagtttataataccacacaatcgctaaaagcaaaattacttgtaagcttcaagaagcgttttggcagcgttctttgcaatttattaaaagtttgtttttcgatcattgattctacttaaaaatactcactaagaaagaacaaaaaagccgtaagcatccaataagatgcttacggcgtgtccttacatttgccctaataattctttgacgatcgcattgacttggttgccgtctgctttgccttttacttgaggcatcacagcgcccatcacttttccgaattccttcggagaagaagctcctgttttttcgatcgcaccagcaacgatttggcgaatttccgcttcatcaagttgtgccggcaagtatttttcaacaattgcaatttcacctttgactttttcagccagatcggtacggtcggctttctcaaattcagtcagagaatcacgacgttgtttcatttcacgagacaacacagtcaattcttcctcttcgttcaagtcggcaccttttttgatctgttcgttttgaatcgatgctttcaacatgcgaatcacctgcaacgtttccttgtctttggctttcatcgctgttttcatgtcatcattcagtgtacttagtagcgtcacactaccagctccaattctcaaaacagtagaaaattagaattttttacgttttctagctgcttcagattttttcttacgctttacacttggtttttcgtaaaattcacgtttacgagattcctgtaaagtacccgcttttgacacggaacgtttgaagcgacgaagagcatcgtcaagtgattcgtttttgcgaacgactgtttttgacatgtaaattccctccctccgagcttaaaaagtaaccgtatttgtcattgaaataaaatctcaaaaaacaagactgtcctttgaaaattatagctaacccctgaaaaagtgtcaaggtattctagtaaaaaagtcgatgaacttcctgattcaatcttagaatccgaacaatcagcgacaatcttcacatctgcctagaatttcaaaacgatggccttcgatactgcacccgggcaattgttcttgaaagaaatccattggacaaatatgcagctcttttgttttgccacaaaccgtgcaaataaaatgatgatggtgatgatcttccaattccacgcagcaattataacgaaatttcatttctccattcaattcagtctcttccaagatgccaatctcagaaaaatcatgaaggttccgatagatcgtgtcataacttagacccgggtattcttcagacatgaaatcatggatttcttttgccggcaaataacggttgcgtttcactaaataagtaatgatagcttctctttttttggtatatttatagccatgttcttttaatatcgacatagcttgctcaatcaatggttgatttttcatcgaatccctccagtaaatcaaaatcattccgatttttagcgatcgtaagtatggtataatgaaattatcaaaaatgcaagagaggattttactatgaacccacaagaaacgattgtcacgatttttgtcttgtccgattcagcaggagaaacggcctccaaattagctcaagcaaccatggcacagtacccaagtgttgaattcaacttatttcggcgtacctttattcacaccaaagaacacttgatccaggcgttgactgatgccaaaaaacacgatgccattattttgcacacactgattaacgatgagctagtctcgctaaccaatcacttttgtgaagaagccgacctatatcattttgatgtattgactcctcctgtcaccgaggtagaaaaacgcacaggtgtcgctccgtcgcgagaacccggcgcattgcatcatttaaacaaaaattatttcaaacgtatcaaagcaatggaattcgctgttaaatacgatgatggaaaagacccacgaggttttctcgaagccgatgtcgttttgttaggtgtttcccgaacatcaaaaacaccgctaagtcttttcttagccaacaaaaacttgaaggtggcgaatttgcctcttgtgccccaagcacatattcctaagcagttgtgggaaatcgaaccgagcaaaatcgttgggttaacgaatgatcccgacgttttaaacagcatacgcaaagaacggatgcgttcttacggattgaatccagacacggcgtattcagatattgaaaaaatccgggctgaattagagtttgccaatgatctttatcaaaaattaggctgcatcgtcattaatgttgcctctctttcaattgaagagacagcttccatgattttgaatgcattgaatttggaagaccatagttactacacgtcagaaacagaagaataaccagccacatacattttagacaaaaagatccccagagtaatggtcagctagactgtaccattattctggggatttttgcttgtgtcaaatcagaaaagtctaaaagacttggacgccttcgcgatcgatctgcagctgttcgattgctgcattggtttcaagcgcatggagaaggcggcagatcttatctgccttttcgggtgggacaatcgctaagacagttggtccagccccactcaggaagcagccatagccgccttcttcttcacaaatttggcggatcgtggataaatgcggaattaatttttcacgatagttctcatgaaaacgatccgcctgcatcattttacctgctaaaggtagattccctttgatcactgctgcgatcatcacattggcgattgcactggcttcaacagcagttgaaaagtccagtgttttagggaggacattccgactagcttctgtcaacaattgttcttgcggaatataagcaacaatattgcattccggaaaatgatgtttaacaacataagtttgtttatgttcatgatcaaaggccgtaatcagaaaatcgccataaattgccggtgccacattgtcggggtggccttcaatggccgttgcaatatcaactttctgtgcatcacttaagttcaggtgtcctaaacgattggctaattcgattccagccacgataaccgatgaactgctgcctaatccccgtgctaaaggtatatctgagtacatgcggattttacgcggtgtaagtgtaggtgcaagcttcagcgcgacacgtaacagcagattactttcatcattagggatttcactgccgagttcatgtaagatctcccatcggtcactttcttccataatttcaatgaatagatattttgagagagcaatcccgcaagaatcaaaaccaggtcctaaatttgcactggttgcaggaacgcgaatcttcatagttgagacactcctttacgcaggtgttgccgcatttcttctagatcactcatcttatggatcgctacttcggtagcctgaatagctgtatcaggatctttcaagccgtttccagtaaagactgccactacggtttcaccaggacgaattttcccgtttttcacgtgctgaatcacgcctgctagtgaagcagccgatcctggttcaataaagacaccgtcttgtgcagctacctttcggtaagcattcaagatctcttcgtcggttacagcatcgataaacccttttgattcatcacgagcggcttctgctagcttccaacttgctggattgccgatccgaatcgctgttgcgattgtttctggctcttcgattaccgcgccttttacgattgctgcggcaccttctgcctcaaatccatgcattcttggtagtgaagtcccttgtttgtcatgccattctttgaatcctttccaataagcagagatgtttccagcatttcctactggaattgctagtacatctggcgctttctccaactgctggcaaatttcgaaggcagcggttttttgtccttccaaacggtaaggattgactgaattcacgagggccacagcttctgttttggcaatttctctaactgcttttagtgcttcatcgaaattcccgggaatagaaataatatccgcgccataaacgattgcctgtgccaacttgcccattgcgatcttaccatctggaatcaccacataggctttgattcctgctcgtgtcgcatacgctgctgctgcagcactggtattaccagtagaagcacaaacgattgcttttgcgccttcttccaccgctttggctactgccatcaccattccccgatctttgaaagatccagtaggatttagtccttcgtatttcccatataatgtgatacccaattcttctgataagttattcaatggaatcagcggtgtgtttccttctgctaatgagattagcggtgttttttctgtcaccggtaaatactctttatagtgctttaatagtccttcatacatctgctactcctccattactttcatgatttggctaattcgaccatcttcaaaaatcgataatgctgctgttaattccgagggactcaatggcttcgtcaaaaatgctttcttttccaagatagattcttggtcgatccagtccaatgtctgttgctgcgctgctaatggtccagtcaacgcaatgtaataacgttgacgaagctcatctggtactgcaatctgagtcggctgttcaaaggttagaaatgattcagtgatcccagcagatttatttttagcgatctccgtcacatctgccagcacactcgtcgcagtaggacgagcccccgctccaggcccgtaaagcatggaacgatcgatgcccgtactttcgatatacacgccattaaactcatatttgattgaggctagcggatggggcttagggacaagaactggaccaacagaaacagcgacatgattttttggtgtcttttgtgccgtaccaataagtttcacttcataccctagttgttgggcataaatgatgtcttcaattgctaatccacgaatgccgccgatagaaacatctttcatctcgatcgtcataccaaatgcaaattttgtcaagaggaccatcttataagctgcatcaataccgtccacatcattggtcgggtccgattctgcaaatccttttgcctgtgcttcagctagaacttcctcataacttaagttatctgttaacatttttgtcagcatataattcgtcgtaccattgacgatgccagaaatcgaggtaatcgtatcgggtaaataatgcgtgcttaatgttcgcaagataggaatcccgcctcccacgctggcttcataatacaatgcaacaccggcttttttagcagcggcagtcagttctgggccatgagacgccaagagatctttattggcggttacaacatgtttcttgtgagctaacgcaccaagaataaaatccttcgcaggatcgatcttgccaatcaattccacaatgacatcgatggactcatcctgatagatttcctgaatatcactagtcagttcaaacccgtatttttgggcaattgcgcttttatcatcataaggagaggccaatgctttcgtaataaaaatctcgacaccagttcgggctgcgattgcctctctttgttccgctaatagttggcagactccagtgcctacgacacccattcctagtagtcctatatttaattgctctttcatatagcctccttaccgaaaacgttattaaaaaatcgttcatccatttttaattttctactagcataccaaaaagcataagaaaaaactaggactttcgagaaattctcgtcctagtttcagcggtgatggatatgagcgaatgttttttgtaagatgtcgactacgtgcttgtcatctaaactatataaaattgtctttccttgtcgttccgattttacgatccgattatctttcaatagtttcaattgatgagagaccgcagattgttccatcatcacttgctctgcgatcgaagttacattacgttctccttcttctaaagaaagcaatatcttcaaacgtgtaggatcaccaagcattttaaaaatttgagtgactttttggatatcttcttgatctggttgagtcatgctggtcttcctttcttgatggtgaataaaattctagctggttcaagcattctttgtcaagccccattgaaaacaaggcgtcaaaataaatgcaggatccacccaaatacctggaaaagaagcagcacattttcctataataagttctccaagaagaactgaatatcagcaaaataatctatctgattctcatccaagtatttgaaaaggatctagctcttgtttatcgcttaaacttctgtaatttcattaatggcagcttcaagttcagcaattttatttgctgcatcttcagaagagtttcctttgacaccaatgtaaaatttgatttttggttcagttccagaaggacgaaccgcaatccagctctcatcttcaagagtatatttcaatacatctgacggtggtgtagtcattttttgcatgtgaccatctaaaccaactcttgtcaattctttgaaatcttctgtttgaacgactggtatacccgcgaaaactgatggtgctttttctcggaatgttttcatcaatgcagtgattttggctgcaccttccataccgctcatcgtaacagaaatcgttttttcggcataataaccatattcctcaaagatatcttgcaatccatcataaagtgttttgtccgattgtttataaaaagcagcgacttcagccaacaagacaagtgcttggatcgcatctttatctctcacaaaaggttttaccaagtaaccgtaactttcttcaaaaccaaacatgaacgtatgggaatgatctgtttcatactgttggattttttcggcaatgaatttgaagccagtcaatacattgaccatttcaacgtcgtaagactgggcaatcgctgttggcaattcactagaaacgatcgattttaggactgctgcattttccggtagtgtgccggcattcttgtgggcttctagaatgtaacggatcatcaatgcgcctaattgatttcctgtcaatacttgatagtttccatcaggcatccggactgcagcacccaagcgatccgcatccggatcagttgcaatcaacaagtctgcgtcttctttttctcccagagcaatcgcatattcaaaggcagaatgttcttctggatttggtgacttgactgtactgaagtttggatccgcaacagcttgtgaaggttcaataataaattgctcaaaccctgcttgtttcaaagctttttcaccaagcatccgacctgttccgtgtaatggtgtgtaaactaatttaagatttttccctgttgtctcgattaatttttgatcgattgtcactgttttgacttcttttagatacgcagtatcgacctcttcgccgataatcgtgatcaatccactatgctttgcttcttcttctgataaaactggaatttctaatggattttcaatttctcgaacaaaagctgtcaaggcgtccgcatctgctggaggcatttgtccaccatcttcgccgtatactttgtatccattataagctgccggattgtgagatgctgtaatcatgattccagtgaacgtatgcagataacgtaccgcaaaagataattcaggggttggacgtaagctttcaaacacaaaggcaggaatatcgtgttttgctaatgtcttggctgcttccatcgcaaattctggtgaaaaatgacgagaatcatatgcgattgcgacaccgcggcgacgggtttctggatcttgtgtatccatgaagcgcgccaatccctctgttgcttgacggaccgtatagatattcatgcggttgatcccaggtcctaagatccctcgcatcccagcagtaccaaattcaagcggcatataaaaagcatcttgcaacatttctggatctttctccagttctgttaactgatccttcaaccctgcttctaattgttgatgatttttccattgctcataaatttgttcccatcccatacaaaaaccactccttctaactttaaaatgactataattttagtataacactacttctgtttttctcaaagaataaccaaacgaaaatgcaaacgcactgctatcaaaaacgaataacgttttataaataacagtgcgttcgataattatttaactggttgctggtctttttgtgtttctataaaatcaaatacttgttggccagcgatactgccgtccccgactgctgtagtgatttgtcgtaagcctttttctcgaacatcccctaccgcatagacgcctggcatagttgtttccatcatttcattggttgggatccaacctgtttcattcgtgagtccactagctctgaatggttcagtcaatggatctagcccaacgtagataaagacaccaccagccgcttcttccgttacttcatttgttttgacatttcgcacttgaacaccagttacgaccatctcgttgcctttgatttcttccacgacagaatcccaaataaatgagatcttttcattggcaaatgctcgttcttggatgatcttttgcgcacgtagctcatcccgacggtggacaatcgttacttctgaagcaaattgtgttaagtagatcgcttcttcgactgcagaatctccaccaccaactacgatcaaccgtttgttgcggaaaaaggcgccatcacaaactgcacaatatgaaactccgcgtccagcgaattcttcctcgcctttgactcctaattttctatgtacacagcctgttgcaatgatcacagttttcccttgataattcttgtcttctgtgcagacttccttgtactctccatgatccgtgatcccttgaacgatgccataggcattctccacgccaaagcggatggcactttcatacattttaaaagcaagttctgggcctaagatcgaatcgaagccaggataattttcaacctcagcagtattattcatttgaccgccaggagctccccgctcaatcatcagaacagataaatttgaccgtgacgcatacagcgctgctgtcatgccggcaggtccagcgccgataataattacatcatacataattgttccctccattttcgactacccatactttactttcaaaaagaatttctgtcgaatgttctgcttacaaaaaataataagatattcccgtttttttctctgaaaattacattgactttcttttcattttttgtaaaattttcacgatacatctattatatagaaaacggggagtccttacaattgaataagaaaaaacttttgaaaaaatctgatcgggaactattgtttcttagctggccgatttttgttgaactatttttacgtgtgattattgggaatgtcaatgtatggatgatttcccattattctgaaccagcagtcgctgccgtcagcgcagcaaatcaattgctgaatctgaccgtctttatttatggtttcatcactgtcggtacgcaaatcattattgctcaactaattggtgcgaagcagcgagataaaatccctactgtgatcaatacagcactttttggttctctattcttaggtattttgatcagcttgatgtttatctttggctctgatcaattgctgcattttatgggattagaagaagcattggttgatttgggtcgcggctacctgcaagtatatggcggaagcttgtttatttcttcgctgacagctgtcattatcgcggtcatgcgtagccacagctttacgaaacctgctttgcttgtaccgatgtttgccagtatcttagctgttattggtaactactttgtactttacagtccttttggcttacctaatttcggtgtaacaggactagctttctccagtgtcttcggcaatacgattggcttgattgttgcggcatttttactgaaaaaacacgttggtttttctgttctttctgcccgattgaagtatttatcatgggacgtaatgaaaaatgtcttaacctatggcctaccttcctcaggagaatctttgtcttatcaaggagcacaagtggtagtaacgatgatcgttgcgcaattaggttcaagcgtgctgattgctaagtcttatgttacagcgatcactcaatttgtgtatttgatcgcctcggcgttaagtcagggaaatcaaatcatgattggtcgtcatgtaggcgcaggagaatttgagcgagcacaaaaacggggcatgcgcacaatgatcattggcatcatcgcttctgttacaatttgtttattgacttatctctttatcgaaccgattatgggaatctttactaccaatgctgaagtcatctcaatcgctaaaggcgtatttctcgttgaaatcgtcctagagacagcacgtgcggtcaatatgattctagtgggctctttaaatgccagcggggatgttaaattcccattattctgcagtttgattgttctttgggtcatcagcttaccattctcgtactctttggccatcgtctttaaatttggcttgattggtgtctggatcgcttacgcaattgatgaagcattgcggagtattttaatgatttatcgttggtattccggtgtgtggaaaaccaaatcggtagtccatggaaaagaaattgaaggcgaagtcgcttcagaaatctaatgacttgctaaaaaggtcatcttttctgccaattagacaatcgaatgtcaaagcgaataaaagagcgtgaaacaaaagtaagaaatacttttgtttcacgctctaaacacgtctaaacagcggtagccgaaacaatgtcttcggaaataagtcgaaataccaaaaaattgaaaagcaatttccatatattcctccttatttatcgaagtttaacacttctgatcccaacctttttttgctgccttgtgtctatttactgctgaaagaaaatcaattatttttggtttttcctccagattgaaatatactaattacaagtttagaactactgaacaatcaacaattagaaaatactgtcaactatcgaaaggagcaaaaaaatgtcaatttacgcgtttcaagccactttggaaaacggtgaaacctattcattagaacgctatcgggggcaagccatcattgtcgtcaacacggcgacaaaatgcggattgagcccccaattcaacgaacttgaagaattgttccaacgatatcgcgaccaaggattgatggtcttaggcttcccttccaaccaattcaaacaagaagttcattctgctagtgaagctgccgaagcttgtcgcacaacctatggtgttgactttccgatgcatcaattgacagtcatcaacggaaaagaagctgatccgctttttcaatacttggaggaagaagccccaggaacgatggggaaagcgatcaaatggaattttactaaatttttaattgatcgcaagggacatgtcgttgaacgttttgcccctcagaccaatccaaccaaaatgatccctagtattgaaaaggttcttggctaatgatctaaccagaaaaaacatccactcactcatcggtttgcaacagcaatgaatactctctcactgctgtttgcgccatgaatgcggggatgttttcttattctttaaagttgttctccatttgaagcaatcacttctttgtaccaatcaaatgattttttctttttccgggccaatgttccgttcccgtgatcatccatgtccacataaataaagccatagcgttttttcatctcaccagttcctgccgatacaagatcgatacatccccaaggtgtatagccaatcaagtctacgccatcaagagttatcgcatctttcatggctgcaatgtgttttttgaaataatcaattcgataatcgtcattgatcgagccgtcagattccactttgtctatggcaccgaatccattctctactacaaataaaggaagatgataacaatcagacaattgacacaatgagatccgcaaccctaatggatcgaccgcccagccccaatccgattcggctaaataaggatttttcaccgcaggcatttggttgccgccaacatacttgactgtttcaggatttgctgaagaagcggttgacatataatagctaaaaccgatatagtcaaccgttccgttcgcaatgaccgcgtcatctccagcttcttttttgatttcgatcccttcacgttcgaactcttttaccttgtgggcaggataatagccttttgcttgaacgtcaatatagaattcttgttcccgattgaattgcaatgcagctaaaacatcctctggattagctgtcatcggataacttggaatatacgccaccatcatcccaatcatgaaatccgggttgattcggtgtcccatttgtactgctttagcacttgctacaaacaagtgatgagcagcttgatacttatgctgcttatcatttttatgaataccaatttgtgtccaacttctcaaaaagttgatctcgttaaacgtcatccaatatttcactttatcttggtaacgagtgaagatcgtttcgcagaaaaacaagaaatagtcgatcactttgcgattcgaccaaccatcatattcatccgctaaacacataggaatatcaaagtgattgatcgtcaccactggctcaatgccatgcttcaacagctcatcgaaaactgcatcataaaaagccaggccgtcttcgttgatctctctggttccttttggacaaatccgcgcccaggaaatagacatccgaaaacacttaaagcccatctctgcaaacaacgcaatatcttcctgataatgatggtaaaagtctgtcgccacatgactaggataatactgctctggatcgatgtacccaacggcaccttcaggtaattcggtatcccgagtaactttcccgatctggccgtcttttgttttataggtaatcattcgcggctgatccatactgcctcctgtaatggcatcgagggtgcttaacccttttccgccagaaagatagccgccttcatattggttcgcagctgttgcgccaccccaaagaaaattttttggaaaccccatattatccctccatcgtaaagactatcagcggctttcttcttagaattcatccaagaagaagccgcaagcatgattatttgtttgttaagtcttcgccatttgaagcaatgacttgtttgtaccagtcgaaggattttttctttgtccgtttcagcgtaccattgccttcattgtcgcgatcaacatagataaaaccgtagcgttttttcatctcacctgttcccgcagagaccaaatcgatacatcccatgttgtataccctaatagatcaacaccatcttgttcaacggcgtctttcatggcttgtatatgtgctgcaagataatcaattcggtaatcatcctccacatagccatcagcatctggtgtatcaacagcacccaaaccgttctctacaatgaataatggtttttggtaacgatcataaaggtcattcatagtaatccgcaaacctaatgggtcgatctgccagccccattcgcttgcttccaaataaggattttttactgaagcaaaaatatttccagaagtttgttccaatagctcagcatctgttgtcgatacccgagaagagtagtaagagaatgaaataaaatcaactgtgtgggccttcaataactctaagtcgccttcttccattttgatctcaatcccgttacgggccatttccttcaatgcatattgtgggtattctccccgagactggacatcaatgaagaaatagttttcgcgatctgattttcttgatgcccaaacatcttcaggcttacttgtgtaagggtagtaggcacctgcagccagcatacagcccactttattttccggatctacttcgtgagcgattttcgtcgcaatcgcagatgccaataattcatgatgggccgcttggtatttgacctgctccacgttgtcgccttcttcaaaatagaggccagctcccataaatggcgcgtgaagaatcatgttgatttcgttgaaagttaaccaatatttgaccaatcctttgtaacgattaaaaataactcggcataaattctcataaaagcctactaattctcgtgaacgccaagcaccatatttttctactaaatgcattggacaatcaaagtgcgtgatcgttaccagtggttcaataccatatttatggcactcattgaagagatcctcatagaatttcaagccgtcttcatttggtttttgttcgtccccttttggaaaaatacgactccaagcaatggacaaacgataggttttaaagcccatttctccaaataaagcaatatcttctttgtaacgatgatacatatcgattgcttctttggcaggataaaaatgatcctcatcaaaatcaaacattttcatctgtcctgtgatgactggaaaacgatctttaccgatcggtacaacatcgacattggctaagcctcgcccaccttcgttgtaacctccttcacactgattggcagcagttgcgccgccccataaaaagtcttttctaaatcccattatttcattcctactttcttgatattttgttgattaattaagtgattttgccagttcgtcttgaacttcgattccttctttttccaaacgctcaatcgttgatttaaagtttggtagataagctttgtgagcaataaataattcatccattacgcgtttagctgtttctcctgatggcaccaatgggttaatggtgaaagcttgtaatgcggtattgtaatcgccagtaaccgctgcttcgatcgttaaaagctccatagccttcattacttgtagccagcctttttctgcagtcggcagctcgccaaaagccacattgcgggcaccttgtcccccaacatacgcggtaacttcgacaacacaatcagccggtaggtcaggaacagctccctcatttttggttgagaccacgatctgggtatttttgtttgcataaatcgaggcaatcgtttcgcaagccgcatctgaatagtaggctcccccacgttgctgcagctgttctggtttatgatccaattctggatctttataaagttcaaaaagttctgcctctgtttgcttcacttgctgcgctctcgttcctacagtctgatattcttccagtgcatgcttcaacatttcttcttgacgatagtaatagcgatgataaccgcaaggaatcattctcatttgttctaattgttcacgataaaacggcacatcaaaaatatttttcggcaaaccattatcttcctgatacattttatcaataatatccatcgtcacatcatttccgtgtgagtcagtgactttatgccaatggaaatggtttaagccagcaaatttgtagattaactcatccggctctttaccgatcaatgcaggttcgatcatggtcgccatcacaggaacattgcaaagtccaatcactctatcccatttcccataacggacaaccgcttctgtgaccatgccgcttggattggcaaaattaatcaaccaagcatttggacataagcgtttcatatcttctacgatttccagaataattggtactgtccgaaatgctttaaacatcccgccaggaccgttggtttcttgaccgatcatgccataataggcaggaatacgctcatctttgatccgggcattcagcaagcctactcgaaattgagtcgtaacaaaatctgcatctttcaaggcttcttctcgatccagcgtcatgtggattttcacatcataaggagaagcatcccacattcgctgtgccatcgctccaacgattgccagtttttcttttcctgcttcgatatctactaaccaaatttcccgaattggcagttcttcatagcgtttgataaagccttccattaactccggagtataactactgccgccaccaatggtagcgattttgattccttttgtcattgtattgctcctttgctattttatttacacccttattatcatttataaaataattcgattcaatgtaaatttattatttagaaaaagcgtttgcaaatctagggatatcttgcgagtgatttgtaaaaagcatttacaaatcgaatgatataaggaataatatttatatcgacaattattcaaatactcaaaaaagaaaaatttccgataattttatttacaaacaactatataaaaatgtaaaaaggaatgtggataccatgttattacaagaaaaaatgcgccaaatcaagttggcccctgctgaacgatctttgatcgattttttattagccaatccaactgcgatggctgatcaaaccatcaaggaattgtctgaaaaaacctacgttcatccttctacttttattcggatcgccaaaaaattaggcttcaacggttggctcgacttaaagacagcctttttggaagagcaaacctatatgagcagtcattttacagatgttgatgccaactttcccttttcctcccatgacggcattatgacgatcgccaaaaagttagcgaaactcgaacaaacaacaattgaagatacgctttccttgatccatcacgatgaactgcaaaaagcgaaacaatcgctactcaatgccagccatatcaagattttcgcaagtaatgccaataccttgatttctcaagactttgttttgaagatgcggcgtttaggaaaaaacatccatgtttgtgacacttttggcgaaagtgcttatgaagcatccaactgtacttctgatacgacagccatcttgatttcttatactggtgaaaacaagatgatcaaagaaatcggtaaaattcttgccgaacgtcaagtttcaattattggaatgactagtattggcgagaacgcattggcaaaattaagtgattgtgtcttaaatatcacaacccgagaaaggctttactcaaagatcgcaaatttcacaattaatacgtccgtttgctacctactggatgtgctgtatggaatcgtcttttcggaacattatgaaaaaaatcttcagcatttgatcgatattggcatggcttatgacaaacgtcctacttcctcaacgattatcgctgaaccaacctacgataaaaatcttcaatacaaagactctctgtttccgaattaaacggctgacaaaaagcgatcgccccacatggccgatcgcttttatgcatatatagctctttttagaaagtttttgctaaacgagagctgtgatcaaatcatctgaacaagcaacttcatttttatctgattcaataatatctaagtaatcagcagaatttgttaccaaaacaggggtctcaatgttgaaaccagctttgatcagcgcatctttgtcaaaggtaatcaatttttgacctcgagttactctatctccttgcttgacatgcgcttcgaagtattgcccattgagttgaacggtatctaaaccgatatggatcaacaattccaatccgttatctgagatcaacccgatggcgtgtttcgttgggaacaatgtcataacggtaccatcaaatggagcaacgacttccccttttgtaggatggatcaagattcctttacctaagattccttgggcaaaagcttcatctttggcactgcttaaaggtgcaaccgttccttcgataggagaactaatgatttctttacgtacagacattgtaggttcgccttcagcaatttcttcgactactgtattgtctttccagaatgccatcgtcaaaccaaaaccaatcgctgcagagatggcgatagcaatcagtgaagtccacatgccactcgcatctccatccggtgtgatgaagttaaagatcccgaaaataccaagtccgcccatcgtgtagcccgttacaccattgaccattaagaacagtccaccgacagcaccaccgatcatagaatatatgaaaggagtctttttaggaagagtgatcccataaatagctggttcagttacaccaaagataccagaaatgatcgctggcggacataatgctttcatctttttgtctcttaatttgaaatacatggcaacgacaactgctgtttgagcaaagctagctccgaaggaacctgtcaacacttggctgaatccttgttgcgtaacttgcatgatcgctagtggcacaaccgaccagtgtaagccgaagataaccaatacttgccagaagaatcctagaatcaatccataaaccgctggcgagaagtccattagcgcttggaatccggcactcaagagatctgtcaacatgctgatgattggaccaatgatcaagaacccaacaggtaaagcaatcagtaagacgaaaaatggtaccaagaaagtttgcacgacacttggaatcacttttttagcaagtttttgaatctgtgcagcaaatgcaataatgaaaatgactggtacgacactacttgtataggttgcccctacccatggaatacctaagaaagtttgataggcagattgtccaagtaagctataaggtgctgctgctccttctccggcaactgcggtaaaggctgtttgcagcgcagtgccttgaatcgttgggtagcatagagcggctccaataacgataccgaccatcggattcaaacggaatttttttgcagaagtataacctaaaataaccggcataaacataaatattgcatcaccgatcgcattcaacattacatatgtgcctgattctgctgtatagttgaaccaaccctgtgtacccaaaaagactaataatgcattaaaccctttgatcataccggcagctgctaacgcacctaagaaaggctggaaacaaccgctgaggatatcgatcagacgattgaaaatattccctccggaactttcttcttcactgttttcactgatccccgcaacatccactacttctgcatagacatctggcacatgattaccgataactacttggtattgaccgccacttttcatcactgttacgaccccatccatatttttcaagatgtcatcgttcgcgattccttcgtctttcaatttaaaccgcagccgagtgatacagtgggtcaaactattgatattttcttttccgcccacatttgccacgattttttctgctaattcatgatattttcccatttttgtttcctccaatttttgtttgattgaaggtttagccaactgaatgtcactatccaaaaaatgctttactattccccagtttattctgggatgacctcctttcttttatggttagcgattcttttgcaccaatcgcgcaatatgaatcgttaaatacaaactttcatcattggacatatcgtatcgataattcgttaccagaaatgatttgattttttgcacacattgataggcgttgcgatattttatctttaccatctcaaggagctcatcgtcagtctcttccgcatgggtagagtggttctgcatgcgggaaacaaaaaaacgcaaatgcgtagtaaaacgataaaaataaaccgattcttcatcgaaagttgttttaaaatagtatttgacgatattgatgatatcttgcattgttttcgtcaattcataaagattgctttgatcattgttttctgtttgagcgtttaccaaatgcagtgcaatgaaacccgcttcatcttccggcaactcaatcccatagcgctcactaattttttcaatcgttcgttttccgattttgaattcatctggaaaaaatcgcttgatgtcccagagaagaacatttttgacaacgatcccttttttggcacgctcgattgcactatgtaaatgatcaggtaaagaaatatagatcgaatcgttgatcggtgaggacaactcttctcttgcatattcgattacttggttcgaaagttccaaatattctaatggcaagtcggccaataattcctgaaattgggaagcaattgtacgattttctaaacgatatactttatcgatcgtttgatcactgatatcgtcaccaacttttttcttgaatgcgatccctcttcccatcacaataatttcgttttgtttttcatcagtagttatcacgacattattgtttaacactttactgattttcatgttttacccccacttgattattgacgtactaacctatttttatatgagatagccattcaaatcaattttgatccatactccttttttccagaaaaaaaacctaatgagagcagaccaaatagccttactttcatcaggtttagcttgttttttcaacaatcactatccatacgaatgattaacttatccttatgatagcaaacagagaaaacgctgtcaatacattgaccgaaaaaaggattcgttattttacttcctcctgattccttttataaaatgaatcgatgaaaaacaagaaccccacatacccgctcccaagccaacaccaacaaagtgatggagtgatggatacatggaattctagtaattagttagtgtccactggaaggaaacagcaaaaaatattcccgactaatcacacatcactggactgtaatttatacatatctgcataaaggccttgctgttttaacaatgaatcatggtttcctcgttcgacgatacgtcctttatctaaaactaaaatcaattcagcatcccgaatcgtggataatcggtgggcgatggcaatcgtagttctcccttgtcgcatattcgccaacccttcctggatcaatccttctgtttcggtgtcgatattggcagtagcttcatctaaaacgaggattttaggatcagtcaccatcgttctagcaaatgagatcaactgtcgttgcccgctggagtagctagcgccccgttcaatcactttggcatgataagtgccctccagtttttcgataaatttatctgcttgcacaaatttcgctgctgctcggatttgttcttcgctgatttctgggttcaataaacgaatattgtcagaaatatctccatagaacatgaaagcatcttgtaaaaccaatccgactttttttcgtaattcttcgatcgtaaaatcgcgaatatcatgatcgtcaatcaaaatttgtccctcaccaaattcgtaaaagcgcattaaaacattaatgatcgagcttttgccgctaccagtgtgtcccaccaaagcgacggtttctcctggataagcagtaaaggaaatattcttcaatacatgattttctccatcataagaaaaactgacattacgaaattcaatctttccttgttcaatgacttgattcgcatccggatgttgttgtggggtaaattcttcattatccatgattttaagaatacggctaccagccaccatgccatcagtaaagacgctgagaaaatccatcatctgtgtcataggattgaagaagccttggacataggtggtaaaagcataaatcaaccccacttcaatcggagaatgcaaagcatcaaacccaaacaacgttaatgacatcgcaactgcaatcgcatagagaaaattgatgatcggcgataatagcaacgaattagtacgaatcattgcataccttgtcttgaggtattcatcattcgtttcctcaaattctcggttcagacgtgcttcttgtcggaactgctggataatctgcattcccgagatcgactcgttcaatttcgtattcaattgacttaatttttctcgcatttgacgatagattcgggagctgaatttttgataataccagatgacgatcatcaagataggtaagaaaatcagattcaataaagcaatttttacgttgatctgaaacatggcggcaaaagaagataggactgcaaaaataccagtcaaaaccatcaaaaacacataccagaattcatacaatgtttcggtatcattgctgacccgcgacacaatcgaacctgctggagtctgatcaaaataccgcatacctaaactatgcagcttctcgaataacttggtccgcacatattgatacgtctgcaaggaagccatcgagtatagaaaccattgaaaaaaccagatgactgctttgatgactaccccaaagaaatagagacccgcaaagaaatagatgatttgattggttgctgactgttgtgtcagatagttatccatgaatgtctgcagaattctaggcaggagaatgttgacgattgataagagaaaagcaaagaaaatggctgcaaaaaatgtcttcttgaagggttttgcaaattgtaacatccgcttgatgatcaatttttgctctttaaatggaattgattttgaccattcagattcttgacgttccattatacttcactcccttcaattttggcttccagttgttgcttgtcccacatttttttgtaccagccatttttggctaacagggcttcgtgggtccctcgctcgatgattcttccttcatcgataactaagatctcttcggcatgcttcacactacttagccgatgcgcagaaataatcgttgttttgtcttttcgatagtctcgcaatttgtgcaaaatatcttcttctgttttggcatcgacagctgacaaggcatcatctaagatcagtaattctggatcaacaatcaatgcccgtgcgatggacaaccgctgtttctgcccgccagataatgagacccctcgttcaccgaccattgtttcgtatccttctggcaatgctttgatgtcatcattgattgacgccaaatcagcagccgcttcaaccgcttcttgtggtgcttggggtaccgcaaaacggatattgtctcgaatcgacatggaaaaaagaaagtgatcttggggaacatacccgatagagcccaataacgcattcaaagtataatctttgatgctgtgcccgccaaaaagaatgtcaccctcataatgatcatattcccgcatcagcaacttcaaaatggaggttttacctgcaccggttttgccaacgattcctaatgtctgtccttcatgtaaggtaaatgctatctgttgcagcgtgatttcttcggcatcatgatagcgaaaagcgtctaacgccacttcaattttaccttgagccggctcttggatcgcgtgttttttttcaacaatatgggttctttcccccagcaattcagatacccgatcatagctggcattccctcgttctaaaacattgaacagacggccaatggcgaacataggccaaaccagcataccaatataactaataaatgaaaccaattggccaatcgatatctctcctgacatgacaaaacgaccacccacaataatcgttaagacatatgagacaccgataatcaatgtaatgaaaggatcaaaaagtgcatctaaaaaattgactttacggttcttgatgatggcatcatcaattttggcttgaaaatcttgaatatcttctgtctcttgtccaaacgttttgatgacttttatcccagtaatactttcttgtgctttgtcattaatcgctgaaaaagcttcttgcgaatcacgaaaagcatcatgtagtttgctgcctaacactctagccatgaccgcaagaaatggcaaaggaatcaacgcaatcaaggtcagacgccaatcgataaaaaggatcatggcgatgatcgttgctcctccagagataaacgaatccgcaaaggttaaaatacccgccccagcaacgttttgaatggcgttcaaatcattggtggcatgggccatcaaatctccagttcgatgtttttgatagaaaagatgatccattttggtgaagtgatcgaataattgacgacgtaagcttttttccaagcgtgcagcactcccccaaatatttatccgccagacaaaacgaaaaatatattgtgctaatgcagcggcaagcaaaatacctatccaaaataaaatcgtttctatcgaaatctctttttctgcgatctcatcaataatgattccaatcactttgggtggcgctaattgaacgagagccaccaaaaccaatgcggctactcctatataataatgtttcctttcttgtctaaaaaaccaacctaactttctaaaaatcgacataacaccctcctattattcactcctgttggctacgatttgaatcatcgaaattttcggactattttggcaatgactgaccttccgatgtagttacatttcaattcctcgcgaaacacgttttgttacctacccaacgataggcacaattcatttgctcatctacgcttcgcttacagttcttctaagggaaaatcactaagatgaacttgcatgcctcgctgacgcggtcaatcgcagtgactcgcaacacgaggtattcctcctcatttgcttatctacgctctgcttcgcttacagttcttctaagcgaaaagcactaagatgaacttgcatgcctcgctgacgcggtcaatcgcagtgactcgcaacacgaggtattcctcctcatctgcttatctacgctctgcttcgcttacagttcttctagcgaaaatcactaagatgaacttgcatgcttcgctgacgcggtcaatcacagtgactcgcaacaccgagtaggtattcctcctcatctgctctgcctcgctgacgcggtcaatcgcagtgactcgcaacaaaaagcgagctgatgggatcagcccgctttttgcgctaaaaaacctatttttggtttttcatttgttgcatcatttgccgaatcttcttctcagaaggcttttggcccattgacatcatcatcgaacgcaacatatcctcattaacgggaggatttttcttcagataatcttgcatatatttacgcgccaaaaagaagccgccgacagcgcctaataataccgcgataacaacgatcacgattacaattcctaaactaaccatttgaaatctctcctttctcttgtactctcaatgaatcattttactagaaaaaaatacaaaaagaaagagagaaagcaggatttctccaaaaacattccctctatatatcagcttaatgccacatctcgtttgttgaacaaccagtttgtcaaaaagtagatcaataagctgtataacaaaagtccaatcgtcatttcccaataattcaaacccggatcaattattgcattttgcatatccgtttgatgcaataatgtgggaaccgtatctttgatattcataaaattaaatggattccacttcaaccaaggatatttttctatcgcaaaaagcatgatggagttgatgatgctgctcccgaacaacacagctactcctaatcccactgccatactttgagagcgaatgacggcagagatgaacagagtcatggtcatataaaatacaatcaacagtaaattcgttgctgcatagacaagagccacaactatagctggcaattgattataatccgttgatgtgaagggagattcagataccaaaaacaaattgctggcaagaaaactgcttagaaataaaaccagtgtgccaagcaaagcaaataagagtgtgttgatggcttttgcggctaatatctgacttcttgaaaatggccgaatcaacaaaaacttgatggtccctcgactaaattcttctgctaccgctgaagctgccacaataacaacaaataaattcaaaaatgacgtcatgtcgcttagaaaaataaatagatcgttggctttagtatcaggcgagcctaagcggaccacataggtgagtccgaatgttaaaaccaccaaaagtcccaacatgatccatgtagacttttttttcgtgactttgatccattcattttttattagtgtcctcattctagagccctccctcttccgtccaagccaaaaatgtttcttccaacgaagattgctgcaatttcatttcctttaaaccaatccctgcattaacgagggcagcagcgatctcagaacgattatccgtttcaagtgaaatctgtaatccatccgtcaaagcaagcccatcgatttggaatttagtcttcaagacatttaatgcttcctgatcgtcatctgttttgatgatcagtaggcttttttctgccttcaaggtatccatcgcgacttgatgggtcactttccctttttggacaacgatcagatgatctgcaatctgttcgatatcacttaattggtgactcgatactaaaacagaaacaccctgttctcttaacatgagaatcatttcccgaaactctctcataccctttgggtcaagtccgttcattggctcatctaatactaagagagtaggacgatggattaatgcctgtgccacacccaatcgttggcgcatccctagtgaatacgttttgactttttgattgatatattcttctaaatgaacttggcgaatcaagtcatccatctcaactgccgtcatttttgtcttcgccatgcgctggtattgcatcaaattttcgtaaccagtcagataattgtagaactcaggattttctacaatcgctcctaccgaggcaatggctgctttaaaagacgtttctagggaattccccatgatcgtaattgagcctttattgtgcttcattaagccaacgatcattcgaataatcgtcgtcttacccgcaccattcggtcctaataacccgaccacttgcccttgttccactgagaaagaagcattatcaatgatttgcttggttccaatcagtttcgatacatttttcagtgttagtatttctgtcatttcatccctacttcctattcgctatttttttactttcatgataatagttattactaccatcccactagagtattaaaaagtcagcaggaaaaagaatgatcttttcaatttggtcttcttacttccgaatgaacttcaaagaatacgagccagcttcatcaaattgggattttaaattaatgacatgatttaataaaaaataaacgtagtagaaatcaaattgtcatttaacaaatgatggaattggactgaacatataaatttataaagaggtgttttctccgaaatgtgaataattcatctgctgctaggaaaactgatggaaacttaggctgtcaaaaacctgtttatgcttttcgctccgaattttatgaatcttttctttcaaacgttcccagtcactgctggtgggctgaccattccaataaaaaatctccatttgtttgtttgcccctagctggcgatagattgggtaatcactgattagaatatctggttcatcaactgaaggaacatgctggattgctcgatgggaggtgttcaacaatcgatttttgatccataattcttgtgtcttgccaaatttcgattgaatagaaaaagttactggacgctcatatttaataaagactgttcgaacgagcatgcagtattgaaagataagacgatcattcttctttgcaaacccgacaagtggagggatttctctttttattgcgatcaaaaatcgtctcatcgttgggtacatgactgggaaataagcttcaagctcactttccctcgtttgttttccaaacccatctattttatgttctgttccaaaaactgatgagtaggaatgaatcatgagtaagttgaccaataaataatttttttctttcgaagtgagtgccaaatcaaagtatgcagacagtttgtcaataatgatctcctcagtcgaatactgctcattatcaaaccaatcctgatggatttcagtcagatcctcttccaaatatgtattcattactgcaaacataaaataaagaaaactgatttcttcgtccgtgagatcactcacagcgtaaacatttgcctgaaaaaaaggtgccagtatgcattcggtgaactttcttttagtcatcaatggatgctcgaaagtcgttatttcatcaggaatttctacgataaaatgtcgctgtttgattcgctgcaatgaaatagccagcagagataaaaatttattgcaatcaatttttcgcatgtaaggagcgtgacgctcaatttgagtagcaatagtttgcttgtcccttatcgttgctaaaagatctgagtccgtttcatcaaacaactgccaatacatgacatgataaaaataacgtatgtagtactcttttccttcaagtggatttccttttcttaaactgtatgataaatgataatttgctaacacttgattcaattcagtcaattttctttgaatcgtccgtaaactgctatatgtctcttggcttaattgctctaatgagtggtactttcccttaaacaacaaatcaagaaaggtaaatccgacagttctttccaccaagattgcataaactttgcttagcagaaatctaggtgaaaattctatcttgatagtttttgattctgattgataattaaccgtatactcagaatattgctcctgaaataattctacctgttgaataacagacaatagcttgctagttttatagttaaacacagccatcagctctttggttgaataagttgtttgattcctttcataacaataggtgagaaactggttgatttgtttttctgttgtgtcaaataatacatgaaacactgattgaccctcgcttaaatagttattcaaactttgccttcatttaagtttgatttcatctggacaactaaaaagatcttacaatattgtaagttagtgaatgttttgcgatcataccacttcaaaggaacgattgtcaaactacccgtcaaagtcttttattaaaaaatatcggctcaacaaatcttgcgatttgttgagccgaataaattgtaactgttcatttctggggaagaaatttccaatcattttgcttgttctgcctttttgcgacaatctctcaggagagtttacatgccaatctgactattctttatttacttcattatcagcagcgaccgcttttttatttacaatattaaatgaacttcttaaatgtctttttctgttctgagtgtttgtcctgccacaattaattttcatcattattatcgtatgaggaaagactattgggattgctcgtctccttaagtatactagtgtcaatgctggaactctcagaagaagacggtagatcaacaatactccatttacttggctttaaattctctatagttgtaacgtcaccatcgtaaacaatcactaaatccactttgtttttacacttgatctcagacattggtaaatctccacgaattcttaaaaaattctcaataccggaaacccattctacattcgttaaagtcgtttcaccaatgacctttttctcagtacccttaccatcccaaccataagttaacactgctcgaaccgatttggctgatcgtgttttattcggacgaataggtatcgtgatccactttgactgctcatcataaatgatacggttcgttcgtaaagtcaaagatagtttaccgggagctcgttcatttgccaaactatctattttaaagaaaacaataagtaaaataataaaaaaggcaatcaacaaggggattttattcatttgctcacttcctaaatctatttcaggttaacttgataatgagattatagtagtttttttagttaaccacgcgccaaaaaaaagacagaatcaggtggaaattggcatttttcagaaaacaaccaaaaaagactgacacaagaaagacaaaaagtcgcagcgaattcttcgaaaaatccagcagcaaactaccactaactagatcaatattttgtctcttcttatgttcagccttttaaatctgtaaggatattagatttgaaacgatacattcacacgttcatccaatctccaattcattttttctttttattttcgtttatagataacgtaagaaatcaaaagcatgcccccgagaatcatccatttatcattggtcattccggtttgcggtaattgaggattccctccattctttggcggtgccccactctgacttactttaggagcggataatgaagagttgtccacgctattaccattactgttggaagtcgcactctcgctacttaactattggtcgtactttcgttacttgtgctactcattgtactctcactgcttgcggtcgtactttcactacttgtgctacttgttgtactttcactgctttcggtcgtgctttcgcttgaagtgctcgtttctccggtaccactgcccccgcctccatatttcggcgtgtagccagtagttgtgtggactgctgctgaatcattgatcaatgcttgaatggttcccttgtttgtatattgctccaaagacccatcagtttctgttttataggtgatatagattctctcactcgtatcccgcaaaggaatttcaaaagtgccgtctgaattaagcgtaattgggacttggtcaacataagtgggattagttacgcttggaccttacaccactcgtgccgtggtgctgatcaatgcttgatggggtccaagagtatcaatgaatctcccatttttaattgaaaccttattcgtatcataagaattgatataaatacgccaatcaatcgttcgtttgggttcttgtgtgcctagataaagcccttgtttcgtaagtaatgcacctgttccagtatcctcaacccctcgaataaataaaggaattgtcttaattccattaactgtttcaaaatcgagttgattgatctgatcgacggtaatgtcttcactaaattttgtacaaaagtaaaaatctccatgcacattgttgttctgctcaacaaactcagtaaatacaaaagtaagctgattcccaacttgggtgagatttactactaaatgaccgttctcatcatacagttcatagctattattgacaccttcaatctctactgggaggataatcgtcgctttgtccccggcctttaagtcacctaatccttcgagactccatttgagatcaattttgaaagattcgtcttcatctaaagtcgtcacttcttgattctgactattgacaacggatacatcagtgattaagtttgcccccacatccgtctctccgtatacgatttccataccggtaaaaatggggatagttagcaacagagcaacaagtacttttgcaatctttgaaagcatgtgatccctccctgatagttaataggtcaccgccagtataatttacggaaaattcagaagcaagtcatacgaactgtgcgagttatatcacaaggcagggcttcactttcaaattaatcatctgcttttcacagaaaaaaacctatcactcaaacaaagcgataggttttgtaaaaagactgactgattattctgttggatctgcatagcgatcaatttgttgattataacgtagttgacaacaaatataaaaaataacttggaacaataagtaaatacctacgatttcaccatagaactgccaaacgggcaattcaactaataaacgcagtgcggtcatcgcaacagcaaaatgaatcattgccacgatagttggcaaaaaatacataacttgtagctgatgacgcagaattttatgccgttcttttggtgaaacaccaagcacatgcaaagagcgatggtaagcgccgtccttgtcaagatccgcaaacaggcggaaatagatgattgatgcagagaaaataaagaaaacggagcccagtaaaacagtgatcattaaaatgagaccattgccttgacgtgtttcctggaaaactttgtattttgattgataaccaatatgagacggaatgccttcaagtgcttttgaccactcttcatcggacatctcgttgactttgtctgctcctaattcatcgtagatagcggatactttttcatctgtttctttattttcttgatcgatttgctgattgataccatcaattaacgtaggatcgtctgcccactcggggtaatctaaccaaacaaatcctcccgaatcttcagaatcaccaatttctttttgccacttctcaaaagtttgatcagttacaacaccaaggccaaaatagttcaacgaaagcattgagggactatgaacgatcgtcatatcttgctgaaaatcgctatctccgccaatttccagcggatacacatgttgtcgttggctttggtcaaccgacaacagttctttacgtcttgaataattgctgctaagttcaagcacttgatcatccataacaggttcagctttttctccgatttggctcatcaatttgcgataatcactttctcgcatcaatgaaaatgcattgttcatgtaatatggatcagtagcaatcgctggattttcaagatttgtgtaggtctcaatgagatccacttgttccataaccggatgatagccttgcgcttccaatttttctttcacttcaaacgccttcgttttacctatttcatctttttcgtattccgaaaaaacatacgctacactaattccttgaatcgaagaaaacgaagtgttgccaatcgccatcattactgctattcctacaaaagccactgatgtactaatggcgatcagactgtacattgccgcattgtcccgcatacgaaaaatccattcactaatcgttaacaagcgtgttccttgtaaaaaagaaggacttcttttaagttgtttcaataagtaaacactaaactgatagaaggacaagatcgtgcctgctaccgtcaacaaaacgcctaataaaagaatcaaaaaaccgtcagctttgaaagaaaaataaaacacacatccgtagccgacaaagagcaaaagcaccccaaggaatgcatagatccgacgactcacaggctccggcctgggcttctcgttttctttgatcaatgatatgatcttttccccttgtaaagcacgcgtactaaaaaatgagatcagcaggaacatcaaaagatacacgccgattgttaatcccaaactagtcaatggaaccataaaagacaatccgcgattgagatgcattacattctgagcaacaagcaataatagctttgttcccaaaattcctaagccaacccctagaaaggtggccagcgatcctaataacgcattttcaataaatagaattcttcgcaaatccttctcttcaatccctaaaatgagatagatcgcgagatcacgtttgcgacgttttaagaaaacaacaaaggtgtaccaaagaaacatcaaagataaaaatgcaattactactaaagcaaccgctaatcccatcttagctagactggaaatggtatcgctcgctgacaagttttcttttagttgcggatggaacaaaagcagactaaatatataaaaaaccatggcagcaaatgtactgcttacgaaataagcagcataggtgcggaagttacctcttaaattacgaatgatcaactgtctgaaattcatgacggcgacctcctagatgtgcaagaacatcaagaattttttggtaaaattgttgctgatcacttccgcgataggcctcattgtaaagtttgccgtctttgatgaaaacaacacgatcagagaaacttgcggaatagggatcatgggtaaccatcatcgttgtcacttgtcgctgtttgttcattcggctcaaaatttccatgacatcacgggctgctttagaatctagattacctgtcggctcatccgcaagcaacagttctggctgatgtatcagcgctcgagcaatcgcaacacgctgctgttctccaccggacaactgatagatccgtttttttcttttgtcattgattcctaactctgtcaaaagcgcttcacagcgccgtttcatctcatcaaccggtactcgatccaatgttaagggcagcataacattctctgccacatttagcggagacaataagttataattttgaaacacgaaacctaactgtcggcgtctaaactcagcaagctgttgttttggcaatgtcagcggttgggcgccattgatgatgaccgagccggatgttggttgatccagagtcgcaactaaattcagcatggtggttttaccactgccagaaggacccataatgctaataaattctccggcaggcactttgagatcaatttgtttcaacacttccacagatacttcaccagtatacgttttagtgatatttttcaactctagtaaagccatagcactcactcctttgctgtcagtgtaacaggttttctgaaacaaacttatcgattgtttgaaagataacttacaattttgtaagtttcgttagctctcgggaaattttaattgcaggacagtcccttgaccgacttcagaagcaatcgtaaccgtaatcgagagtttttgactaatgagagagactaaatagagtcccataccggtagcttctccccgctgccgtccattgtcaccggtataaaaaggtcggaacacccgtggcaaatctgccgctgaaatgccacaacctgtatctgtaatcgtcagacttctgttcgcatcatctaatgcaaaagtgactgttgctttcggattcgagtatttgatggcattactgatcaattgaaaaagtagaatctgcaaccattttttgtctgttgttatccaaaaatcagtctcatccttaattttcggataaatttcatgccggatgaaattgcgcttctgttcaccgatgctttgcttgatcaatgctaataaggaggttgattcaatcaaaaagtcttcttcaaaatcttccagacgaacaaaattcaaggctgtggctaatccgcttttcaaacgatccgtctctgctaaaagatcgtaagggtcaatttgactactctctgccatcagttctaggactgagactggtgttttcatttgatggacccagatattcataaatttgatatgggtttgatgatgggcatcaatcgctgctagttgctcttgtacgtgatgatggtcgtcatctaaaagctttttgactcttctagctaagtaaccagcgcttcttccagataatcctgtttttagatagtggtagaaactgcgattggcgagataatcaatcgtgaaaactcctatcgctaacaagcccactaatagtaagccatagccgatcacaaaaccattgcgatacccatctaaccaaacgagcaaaaggatcaaagcaatcgacatcccaaataaagcaattgctggtaattgaactttcaaatattctttcattctggtctcccggcaataaaaagagcataaccctttccacgaatcgtttggattggttcatcaagaccgagacttaccattttttttcgcagacgaccaacatttactgacaatgtgttatcatctacaaaacgttcatcgtcccataatttattcaagatctgttctctggagaccatttctggataagccatcattagtaaagtaagcaattctccttcacgaacagttaacacttcttccttttctagataattcatctttaaagcctcaggataataaatcaattccccagcttttagttggcgagcacgattgctctgtgcatagtctccatatactcgccgaatatgactttttatttttgctaagagtaattcataagaaaacggtttgatcagaaaatcatctgctccatactcaagtgccatcacttgatccatattaccgtcacgagccgaaataaacaaaatgggtaccaaggattgctcgcggattttttgacaccaataaaaaccatcaaaaaaaggtaaattaacatctaacaaaaccaaatctggctctattctatgaaattcttccaagatcttttcgaaatcctgcggaataaaagtctcgaaggcatagcgagacagctgactttcaatcattttgactaatgacttgtcatcttcaattagaaatattttcacagtgcacctcctaaagtacttctagtttaccaaaagcaacggatcacttccttaaaaaaatcagaaaaagattgtccacttatttattgtaagcaaaatgattttatagtaaactatttctcgtgacatgttaaatatatctaaaaggtggaaaattgatgaaaaatgttttagttgtaaaagcaaataaccgtcctgacggagtatctgcaaaaatgttcgatacttttgtagaaaatctagatcgaacagcagtagatgtagttacttttgatgtttacgcacaaccaatgccttatatcggacaaacattgttcgaagcattcggaaaattagcacaagaacaagatttaaaccaagaagaacaagaattgatgaccgtccgtcaagacgtcatgaataaatttgcagcagcagatacgattgtctttgcatttcctatgtggaacttgacgattcctgcggcattgcacacatttatcgattatattttccaagccggtttcactttctcctacaatgaagatggatctatgaaccaattattgaaagacaaagaagttgtcttgttaaatgcccgtggcggtgtttactcaggtgaaatgagcggcatggaaagtgctgttacatttatggaaaaagtatttggtggtatgtttggcatgacgatcagcgatgaagtaatcattgaaggtcacaatgcagacccttcaaaaactgaagaaatcattgcagccggcctagaaaaagtggcagaagcagcaaaaaaattctaataaaaaattaaaaatctcaggaatgataagcgaaccaacaatgcgaactagcagttatgggacagctttattcctgagatttttttattactgttaaacaagaccgtctttccaatcaagtggtaaaagctgagcaagcggcagactgcccgccttcgtcaagacttgcgcagaaagattgtcttcagacagctgactgagaaactcgcggcaacgaccacaaggtgagatcggatgcccctgccagtccacagccacaacttttgcaatgtgatgttctcccgcagtgatcatagctgctgcagctgcatgttctgcacaaaaacccatagaacaactagtgtcaatgcacactccagtaaaaacgttcccttctctggtaaggatggctgctgcaacaccgcctgattctgcccagggagacagttttcttggtgcaatcttcgcttgggcgaaagtaatcaattcatcaaactccatctattcctcctgctaaacccattctttcttcaataatcgaaacagttccagactaggttagactttttttacgccataggataatgtggttcattgctccatgatcttagtcaacaagtctggatcaaacgtttgttgctgcagcatggcgatttcaaaaccataaggagcttttttattctttttgtcttctccaacataaggagtttctaaaatttttgggagttgcttcaattgttcatgatggacgattttattcaatgcttcaaaaccaatcgttccaaaaccaatattcgcatgccgatctttatggctgccttggggatttttggaatcattgacatggattacttttaaacgttccagtccaatgaccttatcaaactcatttaagacaccatcaaaatcttctttgacgttatatccagcatcattggtgtggcaagtatcaaacgtcaccgaaagcttctcattcagcgtaacaccatcaataattgcagcaatttcttcaaaactgcgtccgatttccgttcctttaccagccatcgtttctaaagcaatctgagccgtttgccctttttccaagacttcgttcaatcctttgatgatttgcttgatacctgcttctggccctgcaccaacgtgagctcctggatgcaatgtgatttgcgttgcgcccaatgcctgtgctcgttgaatctccgcttgtaaaaacgacaccgcaaagccaaaattttctggtttgatggtatttcccaaattaatgatataaggtgcgtggacaacaatattcgaaatgcctgctttcgtcatgaaatcttgtccagcagcaatattcatctcttcaattttcttacgacgggtattttgtggagcccccgtataaatcataaaggtagttgcttggtagcttgctgcttcctctgccgctcccagcaacatttttttcccactcatggaaacatgtgatccaattaacattgattgtcttcctcctaaaaataagtcttgtctattatgcgaaaaaacattcattcacgctagttttttgcttgccgttttctttgactttatccactatattaagccaatccaaataaaatcagtacgagtgtcatgagaggcaaactaatcaagaaactgatagaagacacaaagccgactgcctcttcctccatacctgccaatacagaattgatcacaccgaataaaggaattggagcaaataccagtaaacacaacacgggcttcaaaaaagcgggaagaggtaaaaagaaaaagcagagaaataatagcaaaccgattccataacgcaaactcaaaatctttcctaccgttgcagcagcatgtttcggtaaacgaaaatctaaaaacaaaccaatcatgaacatcgatagaaaggtattggcattaccgataggttggactagctggatcaccccttgcggtaatgagagcccaaagctgcggatcagcaacatgaataaatagcaagtaaaggttggcgatcgtaataaattaagaatgatttttcctggctcaaaaactgtccgtttcccgattagatactcaatcaaaatggtggtgcctcctgccaacataatactgttacccatatcaaacaatgaaatcaaggggattcctaatggataaaaactttgtgcaaaaggaatcgcgaaatttccgatattgaacccggagccacaatacatcgaaaactgacgtaacacatcattctcttttttggttaggaaaaaggcagtcataatctgcacgaacgtgatgattaccgcaattaaaattaatgccagtgcgtccatttggatctgcatatcggcaagattaagaatgattgctgctggcagagtgacattgaggatcatccgagacagaatagatccatccgcttttgataggacctttagctgtttaagaaaataccccaaaaagatcattgcaaagagaccagcggcattcaaaaataattgtcccataaacgatctgtttcctcctctattgatttgaaaaaaagcgaacccactcagcggttcgctttttactcatttcactctctagcaactagctaaaatgtcaacaagaaatattttttcttcccacggcgaataacaacatatttgccgccgatacggtcttcttcgttgatcacgtaatttaattcttgttggcgttcgccattcacatagattgccccgttttggatatcttcccgggcttgtcgtttcgatgcttcgattttcgaagtagtcaacaattctacaatgtttaactcatcatcattcgagacttgataggttgggacccctttgaatccttgtgcaatttcgtcagcagacagtcctttgatatccccattgaacaagctttcagaaatatgaacagcttgctcatatgcttttgcaccatgaactaatgtggtcacttctttggccaacgctttttgggcaactcgtgtttctggtgcagctaagaattctttttcaattgctgcaatttcttcaagtgataagaaagtgaagtatttcaagaatttcacagcgtcacggtcatccgtattgatccaaaactgataaaattcgtaaggtgttgttttgtcggcatctagccaaactgcattcccctcagttttaccaaacttggtaccatctgccttagtaatcaaaggcatcgtcaaaccaaacccttggacttctcgttcgcgacgtagcagttcaattcctgacgtgatatttccccactggtcactgcctccaagttgcaatagacagccatgttcatcataaagatttaggaagtcataggcttgcagcaattggtaagcaaattcggtataagaaattcccgtttcaatgcggcgttttacgctttctttgctcatcatgtagttgatggtaaagttcttccctacatcacgtaggaaatcgatcaattttaattcgcctaaccagtcataattattggctaaaattgctggattcgtttgatcctcaaagtcaataaaacgagacaattgatttttgatactttgagaccattccttgacggtatctaatgtatttaattgccgttcttggtccttgaaagatggatccccaatcatccctgttcctccgcctactaatgcaataggaacatgtcctcgttgttggaaacggcgcagcatcaagatcggtaaaagatggccaatgtgcaaactatcagcggttggatcaaacccaatatatagtttcacagactcttcgtttaattgtttgatcaatgcactttcgtcagtagtctgatgaaccagaccacgactttttaattcttcaaaaaagtctgaactcattttttttcctcctaaatcattactcactgttcatattaactgaaaatccgcctaaagaaaagccttaatcccattttggatcaatcccgtatttgttataatttgattgtgataacgagcaaaactatccaagtgcgttgatttttgctataatacaacggaatctattctaatatcattgaggtgaccatttttgccccaaaataagaaaaaacaaccaaaatctccaagtacgaaaaagagctggttttatttcaatatcagcttgcgcgtgctccattcgctctttttagtcgcaatttcctttttgattctgggcggttcactcgcactaggtatcggtgttggctattttgcatttttagtagaagataccgctgccccgtcaaaagaagaactgcagcaagaattaaccgacatcacagagacttcacagctagcttatgcggatggtagtaaaatcgccacgattcgatcagatctgatgcgtacatcggtttcttcagataaaatttctgattatctcaaaaaagcgatcattgcaacagaagacgaatatttcaatcagcataatggcgtcgttcctaaagcggtcgtccgtgccctcctctctgaagcaactggctttggtggtggcggtggatcgacattaactcagcaattagtcaaacagcaaattctctcaagcgaaactacttttaaacgcaaagccaatgagattctcttggcgatggaagtcgaaaagtttttctctaaagatgagatagtcacaatgtacttaaatatttcaccatttggtagaaataataaagggcaaaatattgccggcgtgcaagaagcggcccaaggaatatttggcgtcaatgctgccgatcttacacttccccaagctgcttttattgctggattgccacaaagcccgatcgtctatagtccgtacacgaatactggtgaaatcaaagaaaatctcagtgccggtttagatcgaaaagacttcgtcctctttagtatgtatcgtaatcatgacatctcaaaaaaagaatacgacgaagcaatggcttatgatttgaaacaagacttcaaaaaacaagaagccattgagcagaccgatcagagtttcctctattatacggttctcaatgaagccaaagatatcatcgctaaacaattggcggacgaagataaagttagcgcagaagaatacagtaaagaagaaacctatcagaaatatttagaattagcacaacaaaaattagtcaatggtggttacacagttacctctaccattgataaaaacatctataatgccatgcaagacgctgtgtccaaatatggctatatgctggataactggggcgatgcgcccattgaagttgggaatgtcatgatggataatgcaacaggccgtgtgcttgggttcattggtggtcgcgattatcagcaaaatcaattcaatcatgcgttcgatgcccaaagacaagctggatcaagtattaagccaatgctcgtttacggtcctgccatcgatgaaggcttgatgggttctgaatcaatggtctctgattacgcagctaaatggcgcactggtgaaaatgcggatgaaccaatcgttaacgcgacaaataagggaaccaatacctttatgtcgattcgagaatcattagaagtctctagtaatatcgctgcgacaaacatttttcaagacatttgggagcaagaaggtgacccattcttctcttataagaattatttgagcaagatgaactatcctgaagacaatagttgggcttatgagtctgctcctttaggagtcaccaacgtaactgttttaactcagaccaatggattccaaacgttagcaaacaaaggcgtttaccaggaaggttatgtgatcgaatcgatcaagaacaatgaaggcgaagtcttgtatcagcatgaacaaaaaccagttcaagtcttctctgaagcaacagcatcaatcatgaatgacatgatgcgcagtgtaattgacgaacaaaagacgtctaactttaaatccgttgttagtggtctggattggaaccttggaaatgccgattgggtcggtaaaacaggttcgacaaacaattggtccgattcttggctcgtggtctcaactccttccattaccatcagtagctggtctggtcgtgatgacaacaaagccaccgatagtagtgccggaacacgtaccgctcaatacatggcttatttgatcaatcgcatttatcaatccgaccagaaggtctttggagtggataaaaaattcgagttatccgatgatgtcaaaaagatcaaagtgtctaaggctacaggaacacttccaggcggcacggtcacagtagataacacaagaagaaccaatccaagcgacacagttacttcgtattggacaaaaggcggtcccaaagaagcatcctttgaatttgggattggcggatcgaatgccaattatgcagattattggaagaaaatcgcccctagccgaacaacaacatctacttctaccaatacagccacgaacaatggctctagaagtaccaataaagaagaaaacgccacgaacaataacaataatcaaaaagaagcagaaaaaacggaagaaaagaaaaacgagcagaaagaggatgactgattacgtcatcacagtcatttgccaaaatctgttttacctgaagaacgggaagcacatcgttgctcctgttcttttttatatctatatgtaaataaaaaaaccgctcctaagaacggtttcttcttttttctcacttatttcgttgaactcttttcagagataccatatggtaaaacaattgttttttgttctacttcttctttgttcatcattttcgttagtaaacgcatcgctacagcacccatgtcatataaaggctgtgtcacgctagataaacgtggacgggcagcttctgccaataaagaattgttggctgtaatgatttcaaattcttcaggtactttgacacctcggtcaatcaaaccgtctagaacaccgatagcaagttcatcgtctgttacatatgccgctgtcgctccactgttcatgattcgttcaactaatgccaagccttctttaaagctataaggcgcttcaaaaatcaagccttctgaatagtctaagttgttttcttttaacgcttctttataccctttcaaccggttttgaccgttgattggatcaatcaatgcaccgctgacaaaagcgatcttttgattgtttttggctagtaaacttactgcatctttcgtagctgctgtataatcaatgttcacgctccccacttgttcatcgggatcgattgagccagcaagtaccactggtgtttttgaacgcgaaaattcgccacggatttcatcagtgatccgatgacccatgaaaatcacaccgtctacttgttttgccaaaagattgttcagtacgtttacttccttcatactatcgccatcggaattcgccaagataatgttgtatttgtacatcgttgctacgtcatcgatcccacgagccaatgaagaaaagaacatattgctgacatcgggaatgattacaccgactgtagttgtttttttgctagccaatcctcgtgcaacagcatttggacgataatctaagcggtcaatgacttccagaaccttcttacgtgtcgctggcttaacatttggattgccgttcacgacacgagaaaccgtcgccatcgaaacatttgcctcacgagcaacatcataaatcgtaattgtttgtttttccatgatatatctccctttattctgttttcagaaaatcttatttacatttctttgatagaatagcaaactttttgcgaatatgcaaccgttttaattccgctttcatgaaaacttagtcaattttacatatttacggacaagcattctccagtaaagcgtgctaaaatggagaaagaatacttgaaagaaggttttttcatgaataaagaaaaaatacaagaaatgacaacgtggttagccagcaatcaagctgaggtcgcttatatctcaaatccttcaacgattgcctatttttcaggtttcaagagtgaacctcatgaacgcgtattagcactctttctttcacctgataaagaccctttcctatttacaccagctttagaagttgaagaagctaaaaatagtggctggccctacgatgtgattggttatttagatagtgaagatccttggaaaaaaatctgttcagagctagaatctcgttatcacctcaaacgattagcactagaaaagaatgatttgactgttgaacgtttcgaagcattgaatggtttccttccaggaactgatttttcacttgatatcactcctgtgatccagaaaatgcaattaaccaaaacagcagcggaaatcgacacattgcttgaagcaggtaattgggcagacgtcgcttttgagattggtttttctgctgtcaaagaaggtatttctgaaatggagatcgttgcagagattgaatatcaactcaaaaaacgcggcgtttcccacatgtcctttgatacgacggtcttagcaggtgccaatgctgcaagccctcatggggttccaggtaaacaacaaatcaaaccaaatgaactagttctcttcgacctaggtgtgatctggaatggctattgcagcgacgcaacgcgtaccattgcctatcacgagccgactgaattgcaacgaaatatctatgatatcgtccttgaagcggaactgactgcccaagcagctgttagaccaggcattactgcgggtcaactggacgaaattgctcgtggggtcatcgaaagtcatggatacggtgaatacttcaatcatcgattgggtcacgggatcggcacaacggttcatgaatttccatcattgattaccgggaatgatttggtgattgaagaaggcatgtgtttctccatcgaacctgggatttacattcctgaacaagtcggtgttcgtatcgaagattgtatctatgttactgaaactggttgtgtgccgtttacaaaaactgcaaaagagctactagtattgaattaaaaaaggagatggattatgacgcaaaatgtattggttttaggtgggacacgcttttttggcaaacatctcgtcaatgaactgcttacacagggtgcgaacgtaacgattgctactcgtggaaaaacaccagactcatttggtccaaaggtaactcgattgatttttgacagagaagatgaagacagtatccgatctgttttgacaaaagaaacttatgatgtgatttacgataatatcgcctatacctccaatgatattgatattttgatgcgtcatgtcactaccgaacgctatattgtcacaagctctatgtctgtttatccaactttccatgacaatctggtcgaaaaagattttgatccaacagcacatgcttatcgtcttgtgacctcagaacaagtgaactatgcagaaggaaaacgcagtgtcgaggagattttaagccaaaaatactcacaaaattcggcatttgtccgctttccttatgtggtgggaattgatgactataccaaacggttgtctttctatattcaatccgtttgtcaaaaaaaagccatgtttattgacaatctttcccatcaaatgagttttatcgattctaaagaagcaggaaaatttttagcatttttaggaaccagttcctttacaggccccgtcaacgctgctgctaaaggtaccctctcactggcagaaattttagcttatgtctcaaaagaaactggcattgacccacttttatcacctaccggagaagccggaaaatacaatggcacgcctgaatattcgataaatgtagcactagctgaagcaaatggctttcaattctcccaactatctgattggatctactcactatgtgatcaagagatcaaaaacgcttaactatgtgcgccttcgctaaaaaaaacacatccaaactagaaataaatgcgtctgtgatctgtttgatcgcaggaaccgtgttgtcacggctcggcattttatcttcgtttggatgtttttttgctaccgattaaaagcagctcctttaactttcaaaagagaaagattatgcttctggattatttttttccattttatcttttaattcttctttgacttcttcaaaatcttctttcgcatctttggcttctgattttgttgttgcttttacatcagccgcttttttatttgcttcatgtttcaattcgtttgctgctgattttgtttcttttgcagcatcatctacgattggtttggcctcttctgccccttcttttaccgtttccttcatgtctgcagcggaagattttgcatcaataaaaatgtcttctgctgtttcttggacgtcttcatgaagatcactagcagaatttttgacttcgtcagcagattttttgaagcgctcagataaatctcctgcctgtttttttaattcttcaactgtatcgctagaagaactagctgcattatcttttaagtcatctacttttgcagtcaatgaatcagtaaaacctgaagcttgttcgccaagtttagctgctttatctttagcgatctccactaaatcggtacttttatctttagccatatcaccataatcagaagctttatccaataaatcatcggcttgtttggctagtttgtttcgcaagtttttacctgactcgggtgctaataacagggctgctaccgctgctgctgtcccaccaattactgcacctaatagaaatccaccttttttactcattgaaattcctcctcttattgttgtttgttacggtctttgaaaaatttcattgcagtttgacctactttaccagcaacagttgctttagccgttgttcgacctaaactgccaactcgcgagaccaagttctttcctgaactattcaattcagagacgctggtacttaaatctgctactgcagtaaagagcggatcaatggtcgcaactttgccatttacatcctgcagcaattcattggtcttaaccaacaatccctccacttcttttgaaaggatatctacgtcttgggtgatgactcgaatcgtggtattggcttcttccactgttttatccactttggtcatcgttttgcttacttgcatcaataatcgtacaacaaaaacgacaagtacgacgaatgcaatcgcagcgatcaatgctgcaatctctcctcctgtcataaaatgtctccttccccttttacttatattaagaatagcatttcaaacggcgttctacaaataaaagactagcgaattttgttttttttactaaaatctatccgctttcatacaaaaccaaaaaaatgccgaacaactttgattgatcgtcagttgttcggcaagcgttcttcttacttgttctcttttgttggttttggctgggttgctgttttttcagttggtgttaattctttactcaattcaatcaagtattcttttagactgtctttgacttctgggtgtttcaagccatattcaatgcttgtcttcaagaaaccaaatttatcaccaacatcataccgtttaccagtaaattggcgagcaaatacgcgttgtgttttattcaacgtatcaatagcatcagtcaactgaatctcattgccggcacctggtttttgattagctaagatatcaaaaatttctggggtcaacaaatagcggccaataattgccaaatcactaggcgctttgtctggagcaggtttctccacaaagttcttcacgttgtataatcctttatcaacttgcatgccaggatcaataatcccatattttgatgtgtcttcatgcggaacatccatcacagcaatcgttgaagcatgcgttgtttcgtaatcatcgatcaattgcttcgttaatgggacttcatcttccatcaagtcgtcgccaagcattaccacgaagggctcatttcctacaaaggctcttgcttgtaggacagcatgccctaaccctttaggatgtgattgacgaatgaagtgaagattaacatctgtggtttcttcgaccaatttcaataattcagttttgcctttttcttgcagattcatttctagttctaagtttgcatcgaaatggtcttcaattgggcgttttgcttttccggtaacgatcaaaatatcttcgatacctgattgtaaagcttcttcaacaataaattggatcgttggtttatcaacgatcggcaacatttccttagccattgcttttgttgccggtaaaaaacgggttcctaatcctgctgctggaataactgctttttttacattcatttgtctctctccttatcgttacttttcaagcgtaaactcgttctcttctttgccatctctcagcatgatttctttggctgcttgttcgattgcttttccttcataaagaacagaataaatggtttcggtgatcggcatttcaacacctaaagctgctgccagttctcgcgctgcttttgtcgtcgatacaccttcaacgatcattcccatgttttctaatacttcatccaaactgtgtcctttaccaagtaagtttcccgcacgccaatttcgtgaatgaacactcgtacaagtcacaatcaaatcaccaacaccactcaaaccgataaaggtcaatggattggctcccatagctactcctagtcggctgatttcagctaacccgcgggtcatgatcgccgcttttgcgtcgtctccaaagcctaaaccagcaattgctcccgcaccgattgcgatgatattttttaatgctgcaccagtctcaaccccgattacatcattgttcgtataaatacggaaatagtcattcatgaacaattcctgcacatattttgctgattcttcattttcactcgctgcagtaatggtagtaatatcatggacagccacctcttctgcatgagaaggcccggatagcacaacaatatcttgtcgtttctctgtaggaatctcttctgccaaaatttcagatattctcttgtgacttccttgctctaatcctttcgatgcatggatgatcacgggacgattggttgccttttcggcaaactctttagcgaccgcccgaattgctttcgtcggtacaacgaaaagaatggcatctgcatcaatgatcgcttcttcaagagccttaacacctaaaatattttctggtagcttcaaatccggcagataatgacgattcgtatggtacgtattgatttcatcgatttgagctggattgttgccccaaattttcacttcatgaccattctcggataacacttgcgcaagcgcagtcccccaagagccagggcctaatacggctattttttgtttcacgatggaaacctcctctgttcatttacaataaaacttcactcaatcattttaccatagttgccgaaaaataactgctagattacatattcattttctccataggaacggttgtaatcttttacttttgtttttttacggcgccagatcaagacgatgattgcaccaaagaataacacagctgataagacttgcgatactcggatcggtccaaacaagtacaaactatccgttctcattccttcaatgaagaagcgtccaaaaccgtaccagatcagataccctaggaagacttcgccttcttttaaaagtccctttttcttacggagtaagatcaaaacaataaaacctaaaacattccagacagattcgtataagaatgttggttgtcgataagctccatcgatattcatattatcaataataaaattaggtagatggagactttctagaaaggaacggctgacttctgcgccgtgagcttcatgattcatgaaattcccccaacgtccaattccttgtgccaacaacacgctaggtgctgcaatatccaaaaaggtcactggtgaaataaaattgcgtcggcaaaagaaatacagccatattcctccagcgatcaaagccccatagattgccaatcccccagaacgagtattgaaaatttgaattggatctttcaaataaggttctaaatcaaataggacgtaatacagtctgcccccgataattgaaactggcaagccaatcaacataaagtccgttacatcatcggccttcaatcccacacggactgcttctctcgtactcaaccacatcgcaatgatgacaccggagacaataatgatcgcataccaatagatcggcagaccgaacaactcaaaagcaacacgatttactaaagctaacatataaactgttcctctctaatttccagaattttcttcgatcaactgtgtcaatcgattctcaaacgtttgtgtcgcatcataacccattgtttttgcccggaaattcatggctgcaacttcaataatgatggcgacatttcgtccggtttttactggaatcttgatttgcgggatatctacttcaccaatctgaacagttgtatcatccgtacctaagcgatcatattttttatctttagcccacgcttcaaggtaaactgccaactgcacttgcatatagcctctgactgcactggcaccaaataagttcatgacgtcgataattccgattccgcgaatttcaattagatgttggaggattttgggcggttctcccaccagtgtcagttcatcttgcttataaacatctactcgatcatcagcaatcagccggtgtccacgcttgatcaactctaatgccgtctcgcttttcccgatgccactatctccttgaatcaagacacctaatccataaacatctaccaaaactccatgtacgcttgttcgagctgctaatcgtccatctaaatagctcgaaagttcacctagcaatcgtgaagttgaaataggcgaacgcaaaattgcgatattgtgctctgcacaagcttggatcatttcctctgggatagccaatcctctggaaacaatgaatccaggtgtatcttctgaacacattttacgcaagaccatcaaccgctcttccggcatcattcgttcagcaaaagtaatttctttacttccaaatagttgtaatcgatcatgggaataataattgaaatagccggtcaattccaaccccggtcgcgaaatatccccggtgatgattgtccgttccaaacttgtttcatccccttggacgatctctaagttcaaagcctcagccaactcattgaccttgacggtttctgtcataatagtccctctcttcatctccattgattcttcagctgcttctttttcgcaaactgttcctctctattttatcattctatcttaaaacttactacacgtgttattggaactacctatttctttttattttatgctattatttttaaagaggagggatttaattgaaattttcagactatacttacgtacgaccagattttgattcttacaaacacaattatttggaagcgttacacaaccttgaggaagcagccaaccttgaatctgcaaaaacagccatcgatgaattaaattatttgcggggaacgatcgacacggcagtcaacttggcttctattcgacactcaattgatacgacggatccgtattatgaagcagaagatacattttggaatgagtaccagcctcattttgaatcactggattttcgtttctaccgttgtctactcgcttcaccgctagtggaagaattaaaaactatctatccagaaacgttctttttatttgctgaaagtcgcgtgaagttatttgatgaatcactgatcgaattattccaaaaagagaatcaactgacttctgattatggcaaattgattgcttccgcccagctggagttccaaggagacagctatacccttgcacaactacgcccttttactgaacacaaaaatcgtgaaattcgtttggaagcaataaacattcaaacagcattttttgctgaaaatgaaacgaaattcgacacaatttatgatgaattgatcaaagtgcgtacagaaatcgcccataaattaggcttcgaaaattatgttgcttttgcagatgtccaaatgaaccgctgggattatgatcgcaaaatgatcgaaacctatcgaaaggaaattttagaaaaagttgtcccaatcactcaaaagctgtatgcccgccaagcaaaacgtaatcagctatcaaaagccacttttgcggatttgccattggtctatccgaacggaaatgcaacaccgaaaggcaccgcaaacgaattagtggagaaagcccgtaccatgtatcatgaactgtctcaagaaacaggtgaattctttgacttcatggttgatcatgagctcttggatcttttaagcaaaaaaggcaagcaatctgggggttactgtacctttatccaggaatatcaatctccttttatttttgcgaatttcaacgggactgctgctgatgtagatgtcttgactcatgaagctggtcatgcatttcaagcgtttcagtctcgttggatcaaagagccagaaattctttttccaaatttcgagtcttgtgagattcattccatgtcaatggaatttatcgcttggccttggatggatgctttttttgaagaggaaactgcaaagtacaagttcgcccatctggctagcagtctactatttctaccttacggcgtgttagttgatcacttccaacaagaagtctacgaaaatcctgattggactccagagcaacgaaaaacttgttggagagacctggaacgccgctattgtccagaacgtgactacagtgaatttcctgatttggatcgcgggctttactggtttagacaaggacatatttttgagtcacccttttattatatcgactatacgttagctcaagtttgtgcctttcaattttggtatcgttcgatcgtagcccaagatcctactgcttggcaagattatttggccatttgtcaagtcggcggtacacaaacatttcttgaaattctcgaaacagctcacttacgttcgccctttgaaaaaggtgcgttagatgatactctgaaggctgttgatgattacctagagaatgtttccgaagaacaactaaaatagaccacacaatccacggaacgaacgaatcatcattgatttgttcgttccatttttcattgcagtcctttaaataaacgacatgcagtcacgaactagtcaaccaggtacgttaaaagaatagtcagctctttttttgccagctgctaggactaacttactaaggaccaacaaaaaagcaacgaatactcgctgctttcttgcttggctattgagccaattttataagcttattcgttcgcttttttctttcttctaaagaagaaggtaacaacaagcccaatgaatgcaatccccactaatggataaacttgattgtcactcgaaccagtttttggcaaaactcgctgttgacgatctttagcagttgctttgatcagtttacttccatcatttgactttggatcaactggtttagtttgatcattgttgttagatttttttccatcgtcggttgctggttgtttttcgatcacttgaatcgtagccgttgccgtaacagtcaattgtttggttgtcccaaatatgcgctcaaacagcgctggatttgctactttctcatttgaaacaacagaatagttcacctgataagtaccgaccttcctggtatcaacagatccttcaataagaagtcgttcaattgatagggtattgccctcacgatcagttgctgagacaaaattgttcttagcctcccattgatcgcctacatacactactgagtccttaacaactacgcttgtttgatctgctaaaactgtgatcgtagctattgcttcaactttaccattgcggtagctgatttcatatttgccaggtgtcgtagtatcgacatcccctgttatatccaattcagctactgacaacgtttttccctctttatccgtcgcagagacaaagttatcttctgcctgccatgtgtctcctacgtagagcgtactatctttggctaccacggttgcttgatcagacacgacggtgatcgttgccactgactcggcgtttccatttttgtaggtcacttgataactacctgcttttgaagtatcaacatcgccgctaacagttacttctgaaaatgttacgttattgccttgtttgtccgtcgcagaaacaaagttgtcctcagcttgccatgtgtctcctacgtataatgtgctgtcttttgctttgacgcttgtttgatctgctaaaactgtgatcgtagctattgcttcaactttaccattgcggtagctgacttcatattttccgggtgtcgtagtgtctaccgtacctgtgacggttacattagcgagtgatactgcttttccgtctttatctgtgacggatacaaaattgtcttccgcctgccaagaatctcccacatagagcgtactatctttggctaccacggttgcttgatcagacacgacggtgatcgttgccactgccttagctgttccattggtataagtcacttgataactacctacttttgatgtatcaacatcgccgctaatggttacttttgaaaatgttacgttattgccttgtttgtccgacgcagagacaaagttgtcctcggcttgccatgtgtctcctacgtataatgtgctgtcttttactgaaatactggataaatctttttctggtgtgattccaatagatatctggttacccgttcgattgacttttacatccataccagattgaatatcttctggaacaacatatccttcaggaacttttgaaacgtataccttgtatttacctgtataaatatctgtcaactgtgactcgcctacttgatcagtggtggtgttgatcacagttccagtcaactgattgattaacattaatgaaactccagcaatcttttttgtcggcctttctgtatcaaagacatcaagtaaagcagacgttttatagataatcccttccgaatcacctgctgaaaattgcagatttgcgatagtggatgtcgcggtgcgctttgcttcggacaatgtatcaatcgtctcggatgaaatggtgcctgatgcagaaatttgaccagcgttttgagaaaggacggtatagctgatctccacgttctccttaagcacatagtttgcaaaaaccagctgaatctcaccattaactttctctactttataactatcatcaggaacatttgagattctgatggagtttggatcgatttctccattggtgttgccaatagattttaagctgaacgttggatttacaactttctttgttccatcatcaatgtttttcgttttcacagtgacttgggttacgttttttgcgctagtaactgtcctttgactaatatcgataatgtctgttgcggtattagagacagtgaccgtcgatgacccttgttgattaccatacagtggttctttagcaaatcccggtatcagaattgatttcgtttcctgccaaccatttgcataatgataggcaatgatgtatctgtgatcagttgtcccaaaatcgaacgtataataattcgtcgcttcatcatgcgtgatggtagggtaattcggatctgattctttcatgacttgcgtattgtattgcccccgagcccagtattgaggataaatcccttccacttgatcattggagacatcgataatggaaaatacgacatctgtattcattggtacatgtgtttctaccttcagatctttgatggtatcttgccgggcattaactaaaaattgatttttgcttccttgcaacgtttgttctgaatagttttttcttccagtggtaactgttgtattgacagtatccaagccatccgctgagatactaatcggaattttatctactgggatccgcgttgtagaagcgagactgtctggcacataattaaatccaatgtcaaattgaattgaacgattgattggcgtaataaaagtaactaaggaccctccctcaaccttctcgatacggtaatcttgatcgatcttgtaataatagttcacttctggaacttttctaagtgtcaaataatctggatgttcgacgaagattttaagattttcgacaggttgtgttgtgcttccttcaacgttgactgaagtatcatttgaataggcaccattttggttgtagttcccccaagctgtctcagctgaattaggatataaaactgagattggttttacataatcatccccaatcactttgaatttttcattgggaatcaaaggagtcgtgacattcatgacgatgtctttttgatcaaaaggaaccgtaagatgaatcatggaaaatgctaggttactgtctttggttgccgtcaaggtcaacatgccgttagaattttcgactttaaagtattcatctaaaggtacattttgataaaaagcatcattgaccattagttgcttcactgtaagttcctgtccattttcagcggatatcgttatctgctgtccttttttcatttcagttggcatgccatgtaatgttaaatagtaggatcccttttcattggaatataaatttccaccggcaacagctgtataataccttgatgaaatttctttttcagtttgacttgtttttgccacaaaagaaattccacggtactccccagccgatggttcaagatttactgatccaaaaccggtggttggatagtttttgtaataagaatactgatggtaactaatttcagatatgctcatcgtgaattgatagacaacaccataagccttttgctgatccatttgtttgatctcaactgctgtattttgtaagtcattagctgtaattgtataatctgtgccagcggctagctccgtttgcgtttctggcgtgatattccctttgatatctacatcatagctataaacctttagtggttgcgattctatttttttgaaaactgctcctggggtgtcaataagttgcaaagagagtgtttccgttcccgagagcttgcggtctaaattataatacactgtaccatctagaccaaaaatgtttttttgttgctcgtacttcaatgattcgacatcttcataaagatcgatcgcataactggttttatttagatcatcaattgtcactttgatttgcggggtactttttgaataaagataactctttaattcaagggaaaatgttgcatcgtggatagcttgattaaaagtgatcgttacttgacgattggcactgtctacttgccaagtcgcatcgatgccttgaatcgtcccttgattatcggtaaatccaagggtgtccggcaaactaaaaacaacagttgttccagctaagtaatcttcgtcaatgatttcaaaatccaattttagtttaactggtgtattatttagcactcttgtttcctgtgtttggctgtactcttcatcagccatcgtaagcagtgttcctttctttaaaagttcttgcgcctttatttgtcgattggaacgagaagcattttcttctttcttaactattttgggatcagtagaagatttgttggtttcagtttctgcaacactagaatcttttatacctgatgtttcctcactttgatccacttcgttctcttcactggaagaagtatcaacttcttcttgactactagcacttgaagtgaatgaggaagcttctttttcagatgaagccaagataggatctttttctttgtctattttactaattgtttcagctggctgatcagcctcagatgtttcagcaatcaccagtattggcgttgtgatctgagtaagactcaatgcaataacaaccatactttgttctatttttttagtgattttcttcattattctcctccaatttatatatgtatttttaatcaatcgcttttcttattttcttacccacttctaattcttcaccgctaaaaaaagaaagaatgttgtttgttcgatcaattttcctgatttgtcctgtattgataatgtaggatttaaacactttataataagcgggtaggtccaattgcttgatgactttcaaggacatctcaatgtattcgatcgacttcttttggtgaagaacgatttggttgcgctcttctttgaccgttgtgatatagttgattgattctgcatccataacgatcaattctcgtttgttttcaagctttaataagtgctttttgcctaataatgattgctttatttctattgcttcaattaataagtttcttagttggtgtttaaacgcttcttttgtatcaatgatccctaatgggcacaggaggttcatttttttcatctgtatctttgaagcatctattccataaaaagctatttgacattttttacattggcttctcaatcttcctgctaattgaaaacctcgatcatatcctttcatatcagtggaaaataagaataaatcattgatatcggtaaggtgttcattaataaaacgctcaaattggtccggcaggaaaatttctactgaagcacacggaagttggcattcttggatcgctttttttagccactctccattaaaaaaattatcatctactacataaacagcaaagttgcttaaatttgcagacatctaagttctccttttttacatcatttttaattgtattattaatcaaaaatgcccgcttgcactttcaagcgcattaaaagaacctttgtgcaaaaattcagctgtatttaagaacaatataactattcacttagttagtagtagtggatattcagcaagaattgtttccgtagattttagaatggtactctagcgtgggcggcttaactgcttagactattcgttttagtgaatagctattagtcaaaaaagtggtgcgatgatactgctcgtattcccatcgatccccttcataaaatactacttctatcaatatttatcactgcgaaacaataacaaatgaaactaatagacacgagtattttcacagatttttctactcaatttaacatgacacagctagatgaacatgacaaaaaatggttatttcgaagaaataattggcggatttgtctttcttttataaaaaattacaaaaaaagatgttttgcttttcttattattacagtttgtttgttcacattgttctttaatattaaacaacaaaaacatccacacgttctttcaacatagctagctatgtatcagaaacgtgtggatgttttattttgtatatttttcgatatggtgttcagtcacaatcatattgatcactgacataatcaaagcaaccagaatcgctgcaccaaatgaggaaaagccaaagttagcagctcctacaaaagttgaagtcaaattcagcattaaagcattgatgacaaaactgaaaagcccaaatgtcaacagcgttaatggaaatgagatgatactcaagattggtttgatcaacgcatttaaaatagagagaacaaagctggctactaatgccatcatgatgctacgtacatggaccatgtttggcagcaatactgccagagcaacaaaggtgagtgtattcattatcagtcgttgaaagtaggacattagaagtcactccagtcctcatcctcgactttatctgcttctttgcgcggacgatttgtttctttgttgttcgctttgtagtactgattgtcgtgtccatatccaccagagcttttgcgtccagaagggatcaagatcgccatgatgacataaagggtgatcccagggaaaccagctgtcactaatgatagaaagacatagatcacacggatgatcgttggatcgattcctaagtattctgctaaacctcccagagtacctgtaatcactacattattggttgatttcgttaatcgtttgttcatttaccttcaccttccttctgacaatctatctatagatctgatggaatcagattattgttctgtgtctttgataaagacattcccagtcgttgttgaaagatcgacttgtgctactttatcagctacgcggcggaattgcaataattggttcatacgttcttttttctcacgcacgatttcaaaattgctcagccgttgattgatacttcctaagctggtttttgccaagccttcaaatccaactgattgtggtaatgctactttgacatttccgttgactgagctagcatttaatttttgtagtcggtcttctttgtaagtgattcggatattaccgttcactagagaaattccagtattttgtggtgtcgcggtaagagtaacatccccattgacagtttcaatgatagcatcaaggatatctccatcttgaaccaagatatttccattgacaccttcaatctccaacatcgtagcatctactttgcggaaatcgatcgtaccgttggttgatttcgtataaacatctcttgccaccaattcgtcaaatgttacattcccgttcaacaatttcactgcaacatgatcataggtacgtgtcggcagatagaaaaccagatcagcgcggatacgcttgtttggaatttggaatgaaatgcgttcatcgtcgacatcaatttggcttcgtgcatcaaaagcatcgaaaggtgttgcagcatccattttaccatagagtttgattttagcatccactttcacacccggttgatcccacaagcggaattcaacatttccgtttgctagtttcacatcgatcaatgttgcttctgtttcagcatattcaaaggtatgttcaaatttcgttgctgctactcctggaactttcagattgatatctttccattccatgttgtcattcactgattctgaaacagcacgaactgtttttttcaagaattgtccaaattgagtacctgcatcaaccattttttcactgacttgagtaaatgtatcagaggcttgttctttccagtcatctggaatatcaagtttttggctgattttttcttttgtttgtgaccattggtctttgcgaatatttttcaacttcgcatccaatgtcgctttttcttcgctcaaactatctaatgaatcttctagagaagcgattgtcgcttccgtctcttgccgtgttgcaagttcttcttcagataattgatccaattcctcttttgtgttcaattgcatgaggacttcttgtgcttctttcagttcctcttttacaccttgaatttctacattgatctcatctaattcagcagaagcttggtttgccttagttgccaatccgtccaagattttttcaagattttctttatcttgtgcttcattttgacgaagtttttcttcaccatcaaaagaagcttcttctttctcgtgggcttcttcaacttcttcaaaaaagtcattatttgtcttatcagcggatacttcagctgcagctttgttgatttgattctcgtctttggcttttgccattccttccagcaaatccaatgcttcttctgtagaaagcacaccttttttcactaaatccaatacacgttctctttcgttcatggaaattgcctccttcagcaaatttttgtttgcaagtttagcttacgaacctattatgcctgtttttccgcaaactgtcataggtcttaagtaccaagtttttatcaatccgaagttctttcaataaaagagtaattgttctgcttgaaatcagagaagatgattctttgtgaaaggaaaacttgtgcttatcagctttatctaaaaaactacaaaaaaactgtactacagaagaaccgaatagcgcaagaataacctcacacgttttccaatagtttatccatgatcccagatcaatgatacgctatttttcatctctcttcttacagtacagtccgtacaataataatatacattcatgtgaaagctgatgagctaaatctatattttgaacaaagatatgctcactacatcagctcagaacgattactatttaactcactgatcttaccagtagccaaataaacgatccattcgcaaatatttgtgacataatcaccaatccgctcgagatattgggccacagaaagataatccgtaccactgacaactgtctcaggattggctttcatgctatcgatcgttttataatagatatctcgatagtaatcatttacccgctcatccatttgtgcaatcatccgggcatcttcttggtccgtttttacataagcgaccaaaacattgtccaccatttttttgacatagtcagacatatcggaaatttctttctcaatctctgcaattcgggtctcgcctttaacacgaatcgttgactttgcgatagataccgcgtgatctcccattcgttccaaatcggaactagctttcatcacagtgatgatcattcgcaaatcagtcgttacaggttgttgcaaggcaatcatttcgaaacttttcttctcaagtcgaacttccatattgttgattgcttcatcgttttctattacttcttgagcgatctctttatcatgcttcacataagcacgaacagatttatggatcgcactacttacaagcatccccatttcataaaattgattgtgaagattcagtaattcttcttcaaattgtgtacgcaacattgctttttcctcctaaccaaatcttcctgaaatatagtcttctgtttctttctccctcggactcaagaatactttcttggtatcattgaattcgatcaagttgccatctaagaagaaggctgttttgtcagagattcttgaagcttgagacatgttatgagtcacaatgatcattgtgtatcgttcttttagtgtcaaaagggtattttcgattttacctgatgaaataggatccaacgcactggttggttcatctaataaaatgatttccggatcgacagccaatactcgggcaatacaaacccgctgttgctggccgccagacaaagaaagcgcactttgatgaagcttatctttgacatcatcccatactgaggcagctttcaagctttcttccacggttttatcgagaatctctttgtctttgacaccctttaattttaacccataaataacgttttcgtaaatcgaaaagggaaatggattcggttgttggaaaaccataccgatttctttccgtaaatctactgtatcttgttgcggactgtagatgtcttttcctttatatacgacactccctgtgatcgtgacaccaggaatcaaatcattcatccgattcaacgaacgaagataagtcgacttgccgcagccggaaggaccgatcattgcagtaatttctcctttattgatggaaagatcgattccttttagtgcttctttttttccataatataaatgcagatcttttgatgtgataatttcttctgccatttcttagcctccgtttactgatcggatcagattagccaaagtgacctgatacataatcttctgttgcttggattttaggacgcgtgaatatttttcgtgtgtgatcatattcaattgcatttcccaagtaaaagaacgcggtatagtcactgatccgtgcagcttgctgcatgttgtgcgtcacgataataatcgaataatcttgctttaagttgaccaatgtttcttcaaccgttccggtagagattggatctagcgcactcgctggttcatccaaaagtaaaatatccggcttcatagcgatggcacgagcaatacacagacgttgttgttgccccccggacaatgctaaagcacttttatccaggctgtctttgacttgatcccacagagcggcttgtttcaaacttgtttcaacgatctcgtctaatttcttcttgttcttttcaccatgacgacgcaaagcaaatgcgatattgtcataaattgatttactgaaaggatttggacgttgaaaaaccatgccaatccgtttgcgcatttcatagacatcgacttctttcgtattgacatcgacacccttgtacataatttgacccgttactttcgtattcgcaataccatcgttcatgcgattcaatgaacgaagataggtcgatttcccacaaccagaaggtccaatcaatgcggtaattttgtttttttcaaattgcagatcgattcctttgatcgcttcattcgttccataccatacgtgcagatcatttgtataaagagcgacgtcttctggtcgatcaaaggtaatgatattgcgttcttcccaattataatcattcatacagtgattctccttatgctgacgtcattttcttatacaatcgtttaccgattgcacgagcgccaaagttaaacaatagaacagcgatgatcaggacagctgaagcgccagctgaaacttggattccatcaggcatcgttccttctgtattgattttccaaatatggacagccaatgtttccgcttgtcggaaaatgctgatcgggctggaaacactcagcgggttccaatttgaaaagtctaacgctggcgcactctgacctgcggtgtaaatcaatgctgcggcttccccgaaaatacgtcctgaacttaggatcacaccagtcaatatccctggtgttgcttcaggaacgatgattcgcatgactgtttcccagcgtgacaatccaagcgacaacccagcttcacgctgtgtatagtggatggcttgcaatgattcttctacatttcttgttagtaatggtaaattgaaaaacgttagtgctagggctcctgaaataatcgagaatccgtaaccgaattggataacgaagactaaaaaaccaaaaagaccgactacaactgaaggcaacgaactaagaatctcaatcgatgttctcactacatctgtaaaccaattctttttcgcatattcggataaatagatcccggcacctaatgaaatcgggaaactaatgatcattgtaaccaataaaagatacaatgagttgaatagctgaatcccaatcccaccaccttcttgataagctttggaaggtgaggtcaaaaattcccaactgatatgaggaatccctcgtactaagatataaagcaataaagaagccaaaatcaaaacaatgattcctgctacagcataaagcacaccagtcgcaattttatctgagcgttttgcattcattatttcaacgctcctttcttaccaatcaatcgaatcacaatattgaacaataaagacattaataataagatcagcgctaatgaccatagcacgttattttcaacagtccccatgatcgtatttccgattcccatcgttagaatcgatgtcaatgttgaagcaggtgtcaccaagctagacggcatcaatgccgcattcccgatcaccatttggatggccaatgcttcaccaaatgcccgagccattccaaagacgactgctgttaaaatccctggaactgctgcccgcaaaacaactttgtaaatcgtttgccatcttgttgctccaagagcaagtgaggcttcgcgatagtgtcttgggactgctcgcaacgcatcgacagtcattgtcgtcacagttggcaagatcatgataaacagaacaaatgtccctgccagaatcccaaaaccagtaccgccaaaaacagaacggaccgctggaacaatcacggatagtccgataaatccgtaaacaacggaggggatccccactagtaactcgataactggctgcaaaatcttttcaccgttgcgaggggaaacttctaccataaagacagctgcaccaatcgcaaatggtgttgcgataatcgctgataagaaagttaccacaaatgagccgacgatcatcggcaatgcgccgacaagcggctgtccatctggaccaacagcactagggttccattgtgtaccaaacaagaaatcaaacacatttactttatcaacgaaaaacgtggcaagcccacgacttgctacaaaataaaaaattgagatcacaaccaaaacgatcaatgcgatacaaagaaaactaatgagctttccccgctgctccatttttgctcgcttagattttttcgttaacacttcttttacattttccacgagggattcctcctcaaaaatcaaactaaattcacaaatattagtttatcgctcgaacatcaatttctgttaaaccttttgtaaatttttcggcaacattgtaaattttgtgtaaaggttacttgatgacatttccttcccaatcacgttcaacttgcattcttgaaataggaatataaccaagatccccaacaatgtgctcttgaacttcatccgaaaggatatactctaggaattctgctgtcagtgctgtaggttctcccttcgtatacatgtgttcatacgcccagactttccagtcatttgtcgtcacattttcgtctgtcggtgctacgccatcaatagaaagaacattgacatcatccgtcacataagagaatgcaacgtaactgatagctcccggcgtatccgaaacaatcgaacggaccattccacttgaatcttgttcttgcgatgggattgctgtttctccatccatgatccatttttcgaaggttcctcttgttccgcttcctgccgcacggttcaatagaacgattttttgatcattcccccccacttctttccagttggtaatttcgcctagaaaaatctttcgtaaattttctgtagagatatcagatacaccgacatttttatttacaataggagtgattcctactacagctactttatgatccacaagtgctttagcatcgataccagacttttcttctgcaaacagatctgagttgccgatatctacagcacctgcttgaacttggctcaatcctgtaccactaccgccaccttgaacattaataaatctgcctgggttttcattttggaattcttctgccacagtctctactaacggctgtaatgcggatgagccgacagcagtgatcgattccccttgatcgatccattttgcacatcctgataatagaatgaccaagcctaaaactggtcccaaaaatttcaattttttcatgataacgctccttgttctctccaaagttaaatacaattatttccattttaccattttatggaattgttgaaaattattatttgctaatatttctcactcctgacaaaaatttactccatttcctacaatcacttacagaaaataactaaaagtaaaaaagtaaaaatttttttcaattagtaaaaagaagtatattgtcaattcttactgtgctatactggataagaaaacaattattaaaagaacataataacctttcttgcttccccaatcaagaatagccccaaattatgttcgacgttttcgtgatttcatcaacatttccccaaatgtatgttgaatcaaaacggcggcagaagtggtcatttatgtaccagcttctgccgtctttttttgtccaaaataacggattattgtgttttatccaggttatctaaccattgtgtgagtttctcagcgatctgttgttgttgttcctcatttgaaatcgaggcagctccgtcaccacgctgtgagccgtaactaccaaaaccagcgtgattgcctcctgagattgtttcgaaaatagctgaatccggcaaacaggtttttgctgcttgataattcccttgattcaatacctcgtcattgctagcagtgagagaaagcacaggcaaattagtctctgctaaactgcctttttcatctggataactcgctaagaaaaagactccctttaacccattcttttgactagcggcataacggcttgcaatcacgccacccaatgaatgcccgccaatcacatagccactatgtggaaattcgtttaaaatattctctgctcgatttcccccaaggaccgccatatcaaagggcatcttgacgattgcaaccgagtatcctttttcagacacctcttttgcccaaatactgtaactttctgcatctactagtgctcccggataaaaaacaacgagtggtttttcagggtctccagagaaataaagcgcatctcgtttctcttgcccttttgaaagagctgcttgagcggcttcacttgccggatagtgtaatttttgccagcccaaccatccacctgcaccgatcagcagtaggccgatcactagaccaagtagtattttttgatattttttcattttccatcctccaaaatcaacaaaatggaaccgcctgaaccaagcagtcgcttcttaactagtttgaagggagcggcacttgcgttcgcgtttccattttgtgggtaaattctttcaagtatttactgatgagccaaggctaacaattcacgcgcatgctctactgtcagttctgtgatttctgctcctgataacatacgagcaatctcagtcactcgttcttcataggataactgacgaactcgagtctccgtccgtccttcttggatcgctttttcaataaaatattgataatcagctactgcggctacttgcggcaaatgagtgatacacaatacttgggaattcaacgcaatttttgagatcttttcagcaattgcttgcgccacgcggccactgactccggtatctacttcgtcaaaaacaatactcgtgatcccttgtttccgtgaaaaaatcgatttcaatgctaataagatacgagacagctcaccaccagatgctacccgaaccaacggcttcatgccttccccaggattggtcgtgagataaaaagccacactatcaaatccagttgctgtcaactgcttgccatttgcaaagcgaacttcaaactgtgcatgttccatatagaggtcgttcaattcttgcacaatttctttttctaatcgatgtgcgatttctcgccgcttgacatggagttgttcagcaagagcccaaacagcatcggccttagctgtcaattgctcttctaactgttccagctggccttcagtataggcagattcagagatctccttactaatttcttcatagtaagctaggatgacggagatggactcgccgtatttgcgcttcaattgacgaatcgtttccagtcggttgataacttcttctagacgtccttcatcaagttcaaggttatctaattgtcgtgaaatatcagaagcagcatcctgcaacaaataataagcgctctggatcgtttcagtgattttttcataggcttgatctaagtgggcgatagattggatctcggacagtgccacactcacaccgtcgacactgctcatttcttctgaagagagcgcaccataactttgccccagtgcatcgacgattttctgatagttggttaacttctcacgttcttcgatcagattttcttcttcgccctcgattaattcagcctgtgcgatttcttcttgttggaatcgcagcatatccatccgttgaacatataattgttcattttcctgaatattgcgaacctgtttttctaaattgcggtattcctgataggcatcctgatagtgcagcagttcttctttgaaaccatcatcgccaaacccatctaccaagctaagatgcctttccggctgtaataactcttgatgttcgttttgtccttgaatatcaactaaaaaaagaccaatctttcgcagacttgccaaggtgaccgtacgtccattgacacgacagattgtttttcctgcttgtgtgatatcccgttggactatcagcacatcttcttgatcaatgcctaattcttctgtcagttcttgaaactcagactgctgcggccattcaaaaaggccttccagtcggcatttctctgctccttgacgcaagtagtcagtagatccgcgtccgccggctaacaagcccatcgcatcaataatgattgatttcccggcacctgtttcacctgtcaaagctgtcattccttcatgaaaagaaaggtgtaagtgggaaataattgcgaaattttgaatggtcaactctaaaagcatggattgcctcctctacataaatcgttgaaaatctttaaacaaagtttctgcatctgcttctgttttagtgatcatcaatacattgtcatcatcatttaaggtaccaaacagttcctttgcatattgtttatcgatcaaatttgccaaagcggaagcatttcccggcaatgtgcgtaaaataacgaatttatccattcgatcaacagaaacaaaggcagctttcaaaatcttttctaatttggcaatgacatcttctgacgtttcttgaggaatgctgtagcggtagccacctttttgtgaagggactttgactagcttcatttctttgatatcgcgggaaattgtcgcttgtgtgaccgacacccctttttcctgaagcaattcgacaaattcttcctgtttttgaatatcttgctcactaagcaatcgtgttatcaaacgatgacgctctttttttctcatctctcgttcctcctgattgaattcctactaattttatcctatttttagacagaaagaaagagagccggcatgtaaaataccagctctgcaaaatcagtaagtttttggatgatgaaaggtttcatgtgcttcagcaacgatctgagggacagagatttcggctttccttgtgccatcaccattctgcactttctgtagatgaaccaaaaattcaatgttgccttcaccgcccgtgatcggtgaaaaactaagatcaagaatattaaagccattcgattgggcaaagtccaagatttcttcgagaaccctttgatggactgcaggatcacgaacaatgccgttttttccgacagatgctttccctgcttcgaattggggcttgatcagcgctatgacttctccttggtctacgagaatttcatgtaacggcggcaagatcaacttcaaagagataaatgacacatcgatggttgctctttctggtaatccttctaaaaaatcagtaggtttggcataacgaaaattcacacgttccatcacgactactcgcggatcttgacgtagtttccacgccaactgattgtagccaacgtctaaggcataactcatttttgccccattctgcagagctgcatcagtaaagccgccggtagacgcaccaatatccagcagaatttggtctttcacctcaaagtcaaaaattttcaaagctttttcaagttttaagccaccacgggagacataaggtagctttttgcctttgatttgcaactgtgtctccccgctgattttttcacctggtttgtctaaacgttcatttttctctgtgtaaactaatccagccatgacaccgcgcttcgcttgttctctggtttcaaaaagtccttgttggaccgctaaaacatctactcgttcttttttcattactttcctctaatctcgaattgtttgacaacggatgtgatcaatcgttgatcgaaatgtccataactgctcagttcatctaacacagcatacgcttgattcaattcatccttcaacgcttcactagcgccatcaagtcctagcaaagccggataagtacttttagctagtgcatcatctcgatggacaatcttgcccaatacttctgttgtactggtgacatctaaaagatcatcgcggatttggaaggctaagcccatatgacgagcaaattgatcgagcagctggataacttcttctgtctgatccgctaaaataccacctgcaatcactgcaaaacgaatcagttcacctgttttgcgttcgtgaatgctgatcagctcatcaagtgtgagttgctgattttccccttggatatctgctgcctgtccagccaccattcccgctgtgcctgccgtatgactaagctgctgcaaaagcaaaattttcttatctggttcaagatcagctaacgataacaactgaaacgcagcagtcaatagaccgtccccagcaaggattgctagtgcttctccatagactttatggtttgttggtttgcctcgtcgcaaggcgtcatcgtccatcgccggcaaatcatcatgaatcagtgaataggtatgaatcatctctagggctgctgcagtctggtatactcccaaagtcattgacttatggaaagaagcaacggtcgctgtcaacagcagtggacgaattcgtttaccgccagcatgaatggagtagagcatactatctttcaacgtttgatcacttgtatgctcttctagaaatcgaacaatcacagcttcgatctccgaaagatatttttcttgaaattgttgcatgttatccattagtcttcctcatcaaaaagaacttcttcattgttttcagtcatcatttttgttaatgatttttctgctttagccaatgtatctttgcactgtttgcttaataccattcccttttgaaaagcgtcaagagcttcttctaatggtacatcgccttgttccagccgagtaacgatttgttctaattcttgtaatgattcttcaaatgttggatttgccatgatcttctccttctgttgcaataactttaacaagcgcttgaccatcttgataatggacgttcaactcatcaccagcttcaatatctgcgatggttttaacgacttgctcgtctttcgtcgtaaaactgtagcctcgtcccatgatttttagagggctcaaaagatctaacgattggagagcacttaaaaatcgctgttcttttttttcaacgctaagttgaatggctttttctagtcgttgcgttaaataagtaacttcttgtcctgcagctgatagccgtgccttaggtagctgttgttccaaacgatgaatcaactgactggccaccttctctttatcatagagctgtgtttgcaacgattgattcattcgttgctgcaactgatccagcttaatcgcttgggcctcatataagcgctctggttgacgaaaaatataagaacctactgcccgttggaaacgttcttgtttccgctggatttgatacataaatgcttgttcaagccttgtttgcttctcttcgatccgtaaaatttcttctgaaagaactggcactgctaattcagcagcagcagttggtgtggctgctcgtacatcagccactaaatcagcgatggtggtatctgtctcatgtcccacagaagaaatgactggtgtctcggcagcgaatatggcacgtgcaacgcgttcttcattaaatggccagagatcttcgatagaacctccgccgcggccaataatcattgtatcgaaggtgccatctgcttctactcgttggatattttttactacatcatctgctgccttgtctccttggactacggttggaaacaagacgatttcggcaatcggatagcgccgctgcgcagtggtgataatatcccgaatcactgcgccactggggcttgtaagtaccgcgattcgttttggaaatcgtggaaggatttttttgggagctgaaaatagcccttcttctgctaattttttcttaagttgttcgtaggcttgatacaacgcccccactccgtcaggttccatgtgttcaatgtacatctgataatttccgctggcctcatagagtgaaatgcggccaacagccaacactttcattccttcttccggctgaaatcgcagcttgtcaaaagctcccttgaacatgactgtcgaaatttttgcgccatcgtcttttaagctaaaatattgatggtttggccgtctgcgaaaattggagatttctccagtcaaatagacccgttccaagtaaggatcagcatcaaacttgcgtttcaagtatttggtcaatgcggtcacagttaaatattgttgtgccatgttatctctttacagtctcctttgccgctgctaaggtttgtgccatcagcatcgtgatcgtcattggtccgacgcctcgtggaactggcgtgatatagcttgcgataggttcaacttcagcaaatttcacatccccaatcaattttcctgcctcatcacgattcattcctacatcaataacgactgctccttctttcacaaattctttagttacaaaatgaccgcgtccaatcgcaaccactaagatatcggcttgtctagccaatgctggtaaattctgtgtttttgaatgtgcgatcgtgacggtagcatttttaccgagaagcaaatgtgccatcggtttgcctacgatattgcttcggccgatcactaatgcatttttaccttcaagtggaatatcatacgcttcaaacattttcataataccgtaaggggtgcaagggattcgatcgggaacaccagcaaacaatttaccaaggttgataggatggaaaccatcgacatctttttctggtcggatagctagcaacactttctcttcatcgatttgttttggcagtggcagctggactaagataccatgaaagtctgggtcctgattgtacttgtcgatttcactaagtagttcttcttcagttatcgactcgggataatgttcaactttagatcgtatgccgattcttgccgcagccagttctttgtttcgcacatacgtttgacttgctttatcttcccctaccagtagaacaactaagccgggaacaattccttgttcttttaaaagggcggtttctgcagtaagatctgcttgcattttttctgctaattcttttccattaatcaaaatacccatcttgacaactcctctgacttttttctattctagcatagttcgctttgaagaaaaatgatttctggtaggaaaatcatcgtttcccatctctagtatcatagcattttctcattgcaactgcttaaccaaagactcacacagaacaataaaggcagcctcttttgcaaaaggactgcctagttttcactatttatttgtagaaacctaatcaattcaaaacccgcagttttgatataatgagtctgattgatcagctattcttcactcatttttcacaaggtttctgagagtcatcggtgccgcaaaagtgtgatagtttaatcctgagattgaaggattttgtaacactgagttttgattttggctgataacgatcataccggcagttgtttccatcagttctttttcggctgcaatcatcgtttcccatcgcttgttctcatcaagagcataggtagtgctggcatcatccaataagcggccataaaaaggattcgagtaatggcgattgtttccgctatacatcatcttaagtgtagaataaggatcttggtaatcgggagtccaataaattaggaacaaatcatagtcgctttcactagcaagattcaacgctgtttcggctggcagcgagcgcatattgaccttcaaaccagtaaagaggtcctccaaactccattggatactctcacccatttttttgtaggaaccatcatcagtcgttaacagatcaagctcgatttcatcgcctaattctgcttttgcctgttcccaataggctagcgctttttctttatcataggccatcaaatcaccggcttcctcacgaaagtccacgccagtatcaggattagcgacaaagccttctgtgatcgcgccattcaagggtttggatccatctgccataatattattgacaagattctctttatcaatggccaatgcgagagcttttcgtaaattttcattttgtaaaggtgtcggttgtccctttctttcttgatttaaccggatataattcatcgttgccgaaggataagaggcaaattggtcacttgactgcatttgtttggcgatctctccactgatgattgcgacatccaactgtccatcttcataaagatttagcgcggttgcagattcttttaccacatcataatggatctcttctgccagaatagcttcttgatcccaataagattcattcttggctaaatcccaattcatctcagtttgctgccagttttttacaacaaatggtccattataaacaattttgtcgctggctgtcccatattcctgtccaaatttttcgacaaccgattgattttgaggaaagaaaatcggaaaaaccatcaaggaagtaaaatacggagctggttgtgtaagacggacttctaatgtatagtcatcctttgcttcaacacctagcgtatccgccgactgatcaccacgggcaatttcttccgcattttcgatcaatccattcatcaagaaactatactgaaatgcattttcaggatcaatcatccgtttccaagcatattcaaagtcattcgctgtcaccggatccccattgctccattgtgcattttcgcgtaacctaaagcgataagttttgccgtcagacgaaatttccggtaaatcaactgctacacccggctgcacttcatccttttcatccaatagatataagccttcaaaagtggctgtttgaataattgcatctgggaagtccaacatggcagccggatccaatgaagttagctctgtcatagacattagtcgaatcacttgagaggctgaatcttctttctgctttgttgttgtacctgctgtacatccagtcaaaaatatcattgctactatcaaccccaacaatctgttaaatccttttctcattcttttcctccttttttatcgttccaccaaaaaccacacaacctcagccgtttctgtgccatcattgtagttgatatgcccttctccggcttcgatccattgacagtctcccggatttccagtgagatctgttccgtcttctaaaactgtatgagcgcttcctttgatcacataggaaaattcatcttgtgtgtgacgtgcaaatccctctaatggtcttttctcacctggagctaaccgaaccactcccatttgaacctttccgttggtttgattcaatgaatcaaatatcgtttcaaattctttcccattatccactgaaataattttcattttttctgactcctttcaattattactttcaattaaatcgtcagaatattctaaagtcaatacttttattcaaaatatcgcttttatttttatttttcagctgtttttttgaaaaaattacttttattaacacttctctctgtagaaagatccagtttttcacctcaaccaacttaataacaactatggcattgtatcgcaaataaccaaaaaacagcctcagcttttagctgaggctgttttgattaactagtcattcttactttcaatttcactgttcacattagacaaaataccattcacaaattttcttgattggtcatcactgaatgttttggctaattcaatggcttcatttaacgcgactcgattaggaacattgtcaacatacaccatttcatataatgcaattcgtaaaatcgttacatccatttttgataatcgttggatcttccaaccggattttaaatgggactggatcacttcatccaacgcttctttgtactgacatacccctgctacaagttgatccaaatacgctggaacgaagtgttcctgttcttcatcaatcagctcatggtgttccaactcaattgcatgcatgatcgcatcttgtttcgttaaatctttattaaaatctaaaggaaataaggcttgcagagccattttccgaatctcgtgacgtgataattctttactcattttcttcctcgtcgtttccgaataattcttcaatatcaggttgctcaatcttttctggtactacagctaccacatgcacattgacttccgctaagtgaacatctgtcatgaacaatacttgctgtttcactcgatcttgaatttccattgctactttaggcacagaaacgccatagcttagatagcaataaagatcaaccttgatcccagtttcatcgattgtcaagtagacccctttgccatgcgcggagcgtccaagcaattcagtcacactattggctaatgtcccccgcatcccatagacaccttccactttagatgctgcgataccaataatgatctcgatgacttctggtgcgatcacaatttcgcctaattcaggacttgcgtctaagactagatttttatcttcattcataagttttgcctccattctaaacttccacacattgttatctatcccttcacgatatgtttcgtctcaataagtcatgacttggatagacagtttcatttgtatagaggtttcttctcgccctaagtttatcattttctgcactgagaatctataataacccactattctcaatgaattttctgaaataaacgaggatgttgatttacaagatgatcaattctttaggagaatgcgtcaaaacttgattaccagtttctgtgatcaacaaatcatcttcgattcgaacgccgccgatacctggaagataaattcccggttcgtctgtaatgacgttgcccgtaacaaatgctttgtctgctcggaaagagacgtttggtccttcatggatctctagaccgattccgtgacccgttgaatgtccgaaagcttctccatagccgaatgaagcaatatgatcacgtgcgattgcatctaattcaattcctgtcatgcccggtttggctgcagctaaaactttttcttgagcttcaaggacgattcgataaatttcttttaatttgtctccgggatcacctacggcgaacgtccgagtcatatcagaaacatatccttgatagtagcaaccaaaatccagagtgatcaaatctccttgttcaattactttttcactagctaccccatggggcatagctgaacgtaatccactggcaacgattgtatcaaaagaaacgcttgtagcgcccaaagaacgcatgaaaaagtcaagttgattggctacttctatttctgacattccgggacggatcattttcaaaatatgttcaaatccttgatccgcaatatggcaagcttgttggatcaacgcgatttctgactcatctttgacttcccgcaatgcttcgatcatacctgaaacaggagccaatgaagattcttcaataatctcctccaagaccgaataatcagaaaagctgacgtaactttcttcgaaagccaaaacattgatctcttctttttcgcaaatagccgcaacttcttcaaaaatcggtccgctattttttacgatttcaaatccttgtgcttgagcagccgcttgctctgtataacgaaaatcagtaacgaaaaaagctttttccaatgtaatgacagctaaaccagtcgtgccggtaaaattagtcaaataacgcaaattgtatgggctcgtgatcaaaaaaccatcaacggcatcttttctcattgcttctcttaatttttcaactcttaacattctttctccccactttcttgttctgtattattatagcaaacttcccagaaaagcgaaaagaatgaaaaaaatttatacaaaaaaagacagattgcttttagacattctttaatcctcgttaatctggtctatcaaagaaaacaaattcgtctccatcacacgcgccgttaaaatgttttcaccgctttcaagaaggggaatcagtgcatctacggacatgcgtgctgaaattccataggtttgtacaccgtttttttgaatgtaggtcaacgctgtttcaatttgttcaacagatagaatatcacgcgcgtcattcgattccaaggctaaaaagtctttctgggttagtaagtatttcaacatcgattcaaaatgcgcagcggattgttctgtttctgaatagtctgattgttgtttgctagttgcttctgataaatccagaaaaggaaagtcttttaaaaaactctcttcaagtgtcttttcttctgggactacacgagaaaaactattggaaaacccaagcggctgaaaatcttgatttccagttgccccccctgttcgaacagctgtccagagaatttctcctttgggtatttgatacatctgccagtctctcaattcttccaaagataagtctttctcaaaaattaatgtggtgatcaatgaagtgcttttgggcaatttttttaaattgttcaaaaggttctgcttcattgtctgattctcagagaattcaagactcgatgaatctcgcatacgtgattcaaaaagaaaatcttttttttgcgaattagagagataattcttcagcaagtgatttttatcgatcgttactgtctgaatcgtagaatgattctgatcgagattttgataaacttctgtcacctcataactgccaagacctaatgaacgtatttcatacttcgatagaaaatgattttgcgtcgttaactcgttattgatttgacgattcatgatgtaactatcttgatttacttgtagactactttgccgaggatcatagaaaaagaggtcaacaaattttggcattacaagtaaaactgcaattgtcagtacaacagctgcaaaaagaaagaaaatccctcgtttgtaacgttgttgtttgattttcctttgcaattgttcaaagtgaaatggttcattcatttgttaattcctccttaagtaattgtcttcctcgatacaaacgattcttcgcttgcgtgtagctccattctttatacgttgcaatttcctcaattcgccactccaaaaaatagtatagtaaaatcacttctcgcgtatctttaggtaatttctcaatactgcgatacaatgctctttttctctcttgtcctattatttcttccaatggggtagacaactgttggctttctgcttgaaaaacgtgtgaaggaaactttcgccatcgatgtgccaccgtttgtttacgcgtccagtcaatgaagcgatttttgattatttttagtaaaaaatagttgatttgcttttcgtttagctcatcgagagattccgctatgacgagaaacgcctcactgactaaatcttgggcctgctctttattttttgtaaaataaaacgcatacaaataacagtcttgcgagtaatctttatatatttttgctaacagttcatctcccaactcagtcacccctccatacctactatacgaactcacagagaaaaagtcacaaaaaaaaaagccattcattaaaaaatgaatggctgtaagttattttctacgtcccaagaagaacgaaacaacagcgacaaaaatgaccgctccgataatggcaggaacaattgccattccagcaatctgtggtccccatgttccaaatagtgcttgaccaatcgatgccccaactagcccggctacgatatcaaagatacaaccgcgtttctcaccagcgattgcgcctccgattgatccgatgaccgcacctacgatcaatgtccataaaaaatgcataatacccctcctaaactttctaataaaagggtaccacatcaattatggtttgaacaagaatatgcctgcacgttattttctgcgagtgaacgcccgctttagcacatcgaaaaagccaagagaatgaaccatatgatccggatcaacatagacgcgaatcgcccgcaaaactttcttgggctctttcgaagaaaaagtataggtgccattttttttcgtccgaatagcgtaccttgggatccaacgacctttgaacatgacagaggcaatcacgtaatctacatcttcccaaggaatctggataaacttccgctggtcacggtcgttgtaaaattcaaaagccttgtcgccgatcataattttgccatattcgttgatacccaaaaatgaggtcgcatcgatcgtcaaatcaactttggtgttcagggattgtaccataatttgtttgctccatttctacgtcttattgtttcttattatacttgttctgatgatttttggcgaatagataaaaagtgcttgggtttccccaagcacttttagttgaaagattagaacaatccgatcaagtgtccaccgataccgactaagaacaaaccgataatgatgatgattggagaaacttttttcttcaataaccacatacataacagagtaagtaatagtgcagccaacccaggaatcaattgatccaagttgttttgcaaggttgttactttcgtatctgttaatgcacggccttcagcgacttgttggaatgcttgttgtaacccttctggacctgatggcaattttgcccaatccacatatgctccttcatcaagagggacacgagatacaactggtgcaaatgaaattgatacccaacgttgaacaagcgatcctaatacgaacatccctaggattgaagcaccttttgttacgtcttgcagcaaaccacctgaaaggtcatctgtgatttttgatccggcacggtagccaaattcttgtgtataccacataaatgcccagcgaatgatattccaagccaagaagaagatgattgggcctaatatgtttcctcctaacgctagagaagcacctagagctcctaacatcggacgaacagtaaaccagaatacagggtcaccgacaccagccaaaggacccatcataccaacttttaccccttggatcgctacatcatcgacagcggctccattggcacgttcttcttccaatgctaaagttacccctagaattggtgaagcaatatatgggtgagtgttaaagaattccaaatgacgcttcaaagcagcggcacggtcttcttttgttttgtataattttttgattgctggaatcattgagaatgcccaaccaccattttgcatacgttcatagttccatgaaccttgaatgaaggtagagcgccatgctacggctaaacgatcttttttacttaattgaattttttctgccatttttttctcctccttcgattctaatagtcattcaagatatcgcctagagggtcgccagtgttgctgccgccgcctccatttgatgatccgcccattttggtgatgttcaagtaaatcaatgcaatagctactgccaatgcaccgatcgcaatcaatgtcaattcagaaatcgctgcaatcacaaaaccaatgatgaagaatggccatacttcacgagttgccatcatgttgataaccattgcgtaacctacggcaacaaccataccaccaccgatagccataccatctgttaaccaagctggcatagattctaggaagttttgaacagttgcagctggaattgctagcaatgctgctgctggaatcgcaatacggatcccttgcatacatacggcaatcacatgccacatttcgattttgcggatattaccttcttcagcagctgcatccataaagtgaacgattggtacagctaatgtacgtacgatcattgttaagaacaaaccagctacagccaaaggaatcgcaacggcaatggctgtgtcaacaccgccacgtccttgtccacctaaaactaaaataattgcagatgcaacagatgccaatgcagcatccggtgcgacagcggcaccaatgtttgcccaacctaacgcgatcatttgtaatgatccacctaaaataatacatgcttctaagttaccggtcactagaccgatcaatgtacatgccactagcggttgatggaattggaattcatccaagatcccttccataccagctaaaaaggcaacgactactactaataccatagatataatagacatgatagacctcctatttagttgtatactttttacttgttcgacaattcgtttttcgctttacgcaaaatttcatccatgttgtcgcgtgaatcgtttggtactttacgcacatcaaatttgatgccccgtgattttagttcttcgaacgtttcaacgtcttcagtacccatagacaatactttacttacaacaacttttccgactgagtgagccattgaaccaacgttgacttcttgaatgtctacgccgccttctactactcgcaatacatcttctggattttcaaacaatagcaatgctttcgtattaccaaaacgagggtcttttgacacttcgatcattttttctactggaataacattggcttttactcctggaggagctgcttgttcgatcaattttttacgcaagtcgtcttttgcaactgcatctgatactacgatgatccgtgatggattcactgattttgtccatgctgtagctacttgtccgtgaagcaaacgagagtcaacacgagccaatacaattttgatcttgccatcgcccagtacagtacctggaggaagtgatcctttaggttgatcgtcagccacaactggagcagcagcttctgccggttcaagttcttctggtttcaccttgaccccttctttagctgtttcaatgatatgtgcagcaatctcatgtgctgtattcattgaaaaacgtgaagcgtaagcctcgatgaccattggtaaattcataccagctacgattgcccatttgtctttgtggtcttcaaacaagctgtttgcttggttgaaaggtgtaccgccccaaagatcaactaagaataacacttcttcttgatcgtcgaatgtggcgattgcttcttgcatttttgctttgatatcatctgggccttcacttggcatcaatgttacagctttaacattttcttgttcgccgaaaatcattgaaccagattgcaaaatgccgtttgcaaattctccatgacttgctaggataattcctaccatctttttacctcctatttcaaaattgataaatgtgacacttaaatgaaagaaaaaaagcaacgacgaaaaatcaagtgtgactaccctctttttccaaaatatccatcaaatagattttacgatcagcaggaacttttcgaatctcgacttcaatgccctgtttctgcaaataaagcagtgattcgaggtcttgatcattgacagaaacaaaattagtgatcatccgctttcctatcgaaaagctcattcctccaatattgattgaatgaatcggtaatccgcctttgactagtgtgacaacatcttgaggattggtaaataataacatgactttttgggtatcaaataatgcgttatgtgcaacctcaagcattttcgccactgtgacgacattggatttgattcctggcggagcggcttctttcaaaagaaatttgcgaagctgatcatttgcgacttcgtcactgacaacgatgattcggttaataccagtcattttcgaccaggctgttgctacttgaccatgaatcaaacgatcatcgatccgagcaagacgtatatccattcccatcgtaaaaacctcctacatccatcgatccgctggctatttgtggatcccttacttttttcattcacctcctgtatccacttatatagaagcaagaagcgtgccaacttttatacaatacactaatctttggaaaggcttaagaatcggcctcttgatgatacactaaaaaaatacactgaaaaacagtgtatcttttttagtgtattctattcttaatgtattattgatcagccaaaaccgttttttcttgatgatttttaatcaactctgctaagtaatattcttcgctttctggtatttctacatttaacaagcgcgagaacgagcgaacatggatgtgaagttttttgtacatcggctcttgcttcagttcagaaacaaggggttcatcgacagttaaaggttgctttaatacgatccgttcgatcattccagcagagtggagcacaaaattgatttgaaaccctggtattgcatccgtcaattctaaatcattgatcaattgatggccaaattgccacaatggctcgataacttttcgcggattgacaaaagtcaggttttgctccatatatttaaaacaaatttcttctgcttgttcttcaccaagttcaacgtcttgttcaaaactcagatcattctctaacaaaatttcttccaacaattgatctacatcttgatcaatgaatcgttccagagaaataaaaggcgcatcgatttttggatctatgatccctgtcgtggcgatcagttgatactgtctttgtatgggttctaactcagtctttaaatcagccactgaaagagtcacaacctctacattctgattttgacgtttcgagagggaactttgaattagttctttgatcctctgagccgttcctttacccgaggcacagatggctaagatggctttgcgatgatgattgcttaagtgaccctccggctgttcaacggaaccatagccgcgaaattttctaagcgattcatacaaactatcgatgtccgtgccgataactgaggcttttcggactgtttccaaaacgattgatgtcgtcaccatatcgacagtccgtacaatcacacctgtttccctctgaatctcattgttgaaggtagctaaagatcccatatctactaataaaatcacgccgctaccatcattaactgcttgaacactttcttcgatctttttcaatgcaacggtaggcggcatgtccaaaggcatgtctactgctgccacttgatccacttctaaaagttgttgaaccacttgaaccatactgcttgccgtgctgttcccatgggctgctacaactacaccaatttttccagaagaatgggcagtccgcaaagatacgagtaaaacagccaaataataggtttcactttcaggaatcgatactttgaaactatcaccaataaatgtacgaatttctttagcaacttcaaactctttcggatagtcggcgaccatttgacgaatattgtcattggtatgccgttcttctcccagatgaatttttttcaaaaaagaactaatgtgtaagctcatcgcatacacaaaattttgctgaaattcatagttcagccttgtgcgtaccagatcataaatacgatttgtcactgtgatcactttttgatccacaaactcgctcaatttgttttctgaattgaaagaaaagccgtgatctttgtaaaatgatttcaaatgaacattgatatctgtagatatgaaatgattgatggcttcttgatccagcccatccgcttttaataaagcagctttatcgccgataatatcgtaaagattatacggtaattcataagaatcggattgaatattattaagattttggtttggttgaacacgcacagtcggctcaagaattttggacagctctgctaactcatctcggcgattccccaagaccattaatcctgagcggattccttcgggaagttcgtccaaatcaatctcgatttcatcttgttgcatatgattcaagaaccctcgtgcacagaccaactgaacgttggacttcaattgaccaatatttccgaagctgacactgccaatcaacgctttaacgacatcttcagtcaatgtgatcgtgcgttggattcgtgttgcttcttgtcctacaagtacccgaacaagatccactttttctgaggcaggtcgtttttcaaaaaacggcagttggatattgatcggaattctccgagtaaaagtgtccaacaatgtcgaattgggatcctcagtagttgctccgacgatgcgaacattggcttgatgatttttaccagtctcacctaatcgactaaaggttccatgatccataaagtaaaaaatcatttcttgtccttcaggcggcaatcgatgtatttcatctagaaatagcatactttcatccgcctgatcaatgattccggttttctcctgatccgctccggtaaaagcaccgcgaacataaccgaacaaatggctcataagcaactctggattattggcataatcggcacagttgaaaacgatcaactctttttcctcttcgatcacctgattgcttttcgcaaactgaaacatggcgtgagcaaaatacgtcttccctgaacctgttggtccagtgatcaaacaatttagccccttaggaggatacagaattgccgctttggcttgttcgacagcatttttcatgctgccgttcacaccaatgatcgttgaaaaaatatcacggtttcccaatttgacatccactcgctgcggcgtagctttctctctttgggggcggttctctttataacttggaacatatttctcaggcccagaccgtgcatcttgagctacccaatacctcactggccgggtatcactcttttgaacgcggccttctttgacaagttgattcaaatctttgctggcattgcttcgttggatcatcaattgatcagcgacctctgatgtcgtcgttcccttttcattcaagccattttctgtattttccaataaaaattgataaatacgctcaatccgtttccccaacagctccgcctccttgaaagttttatccttgaatactttaatgggtttgaataaaaattgcaaatcttttctgaatactttccctactcaaaccagccaataacctagccacccttaaacacgccccttgaaaaatcttgcagcatacagcactaaccattttttcatagcaccttttgattaacttaagaataaagcatttagcaaaaaaaagacaatctaatgctatgattattgtgtcaatgggtagggaataaattttggcacgtcaccatcaaactgctgcaactctttttgcatccataaaacatcgtgccactgctcaaacttatagccaatttgtgggaaatatgcaacttctttgtaaccaaatttttgatggaacctcacactgcttttattcccagccgtgatacaagcggtcaaatttacgatattttgttttttcaactctgactccaaatgatgataaagcatcgttcctatcccttttgcttttacttctcgatcgatgtaaaccgtcacttccgccgtccagtcataggcagctcgtgttttgtaagcggtggcataagcatagccaagaatgacaccattttcttcagcaatcaagtatggataatgctgaagcgtttgagtgatccggtgcgcaaactcttcctcagttggtatctctgtttcaaaagtaatagccgtatgatctacataaggcgcataaatttttaacaatgatttggtatctgcaacagcagcctttcgaatgttcatatattcccttctttcttcaaatttttatcagtatacctttctaataaaaaaaagacaatccttgtctaaaaacaaggatcatctttacccactagcttacgcttgatttttttcttgcccgcaaaacacagtaatatgttgtggtaatacttggatctcaaccggcagacttggaccagggtctccatcgacattggtttcgatcgttgtatcatccagtagtttgatctgcgctttctcaaacgttagatatccaagggattctttggattccgttactccttttagcagttcgggaatactcttgatggtttcccaaagattgctgtctttaatgtagataagatgcaatttcccatcattcgtactcgcttctggtaacagcgattcaaaaccaccgatcgtattcgacgatcctacgatcagtgtgctgctttcaattttggtttctgttgcttcctgaccactagtgataatttcaaattgatgactttcatttttgcgtacttcccgcaacccggaaaggaaataagccatttttccaagtttcgttttttcttcaacttcaacattgttgatagctgctggaatgatgccgatcgccactacattcatgaaatagtcgtcattgattttcccaatgtcgattttgcgagaatgattcaacgaaaatgattcgattgcttcttcaggatcaagaggaatggccaatgcacgagccaaatcattgactgtacctagagggaaaaagccaaaacgcggacgctcctcatgactagcaattccgctgatcgcctcattaactgtaccatcacctcccattgcaaacacgctatccacggagccgacagcttcagatgcgaaccgctcggcatcacccgctttttctgtgtgtgcaacagccacttcatcaaatagttcctgcaatttttttgttgctaattcctcgtatcctgcagctttttcgcctcctgaactaggattgacgatcaatagtgctttcatctcctctgcctccttaatgctacttcgtttcacattttagtataacaaagagccaccagatttgtcttttgtgcaaaccaccgcgaataactctgaccgaatctccaattgaatcgaatagagctgtgtgtaattgccctatttcttattcttagaccaatcgtttgcgtaaacgccccgaaataaaatcaatacaggtaactgtcaaaataataccaagcaaaatgatgcccacacgactccaagatcgtgcattgatagcaaaaatcatcggtgtaccaatccctcctgctcccactattcccagaatcgatgcagagcgaacagctaattcaaaacgatataaagtaaacgacaaaaactctggaatcaactgcggtaaagtcgcaaatcctaaaaccgcccagcgatttccgccagcactcacaacagattcagaaggtccctgatccatattttcgatcgcttcactatataacttggccaacatacctatggaatggacactgacggctaaaacgcccgcaaaagatcctggaccaacagttttaataaacatgatggctagaacaatctcaggaaacgtgcgaatcgctgttaagacgacttttcctgtgcccgacaagaatctaggtgtatttttgcttcgagctgcccaaaacgcaaaaggaatacttaataaagaagaaataaatgtaccaacaaaagcgatggctaccgtttcaatcattaaactgaacaaatcttcgccatccccggtatagacataactccaatccggatggatcaatccgtagaaaattgcccctaagatttgaccaacgttttctttgatagtagctaaggggattcctgcaaatgcccaaatataaatagcaaccagaacgagcacgaaaagccattttctttttttctggggttccgttggcaacatcatagcaatcgctcccttactctattactgatggtatctataagaagaacaacgataaaaatcgccaaaacgataattgccgtttggtcgtagcgaaattgactcaatgatcgttgcaaaaagacaccgattcctcccgcgccgatataccctaagatcgttgaggcgcgaacattgatttcaaaggcatacaaaagataacttaaaaaatgactcgttacctgcggaagtaccgcgtaacggataatcgccagttttgatccccctgaagcggtgacagcctcgatcggtcccgcttcaattgtttcgatcgactcataaaataatttcgtaatcatcccaaaagaaaagatggaaattgaagtcacaccagctaccggaccaataccgacaactgctacgaacagcgccgccaacatcaaatcaggaatcgttcgtacgatattcaaaagaaagcgaaaaatccccgataaccaaggaattgttaggatatttctggctgccagcaaagaaaaaggcaaagcaatgagcgccccaaacgttgttccgacaattgccatttgaatggtttgaagaagaggctccacaatgatcgtactatacgaccaatctggtcgcagcatttttatcagtatcacgttcatttgatccgcattttcaaaaaaacggcgaagatcgactcccgtaatcgatccactcaaaatcaagacgagcaaaaaaagcaccaaccaaagaatattcttccatagtccgcttcgtttaggcaacaattgagtggtcatttttctgtgcctccttgctcttcgataatctcactgccgtagatttcttttaattttcggtcagtggcttcgctaactggtccatcaaaaacaaggcaaccatcacgtaacccaatgatccgtgtaccatactctcgcgctaattgcacggaatgcaaattgacaacgatcgtaatacctaactcttgattgatccgctttaaatcactcatgaccttctccgttgtcataggatccagagaagctaccggctcatccgctaaaatgatttttggttcctgagtcaatgcccgtgcaatcgagacccgttgttgctgcccaccagacaattgatcggctcttgaataaactttttcggctagattcactctttgtagcgattgataagctagttccttatccgcttgtggaaacaatcccaaaagcatctgaagagtggggtgataagcgactcttccagtgagaacattccttaagacactcgaacgttttaccaaattgaagctttggaaaatcatgccaatgtctcggcgaatcaaacgtaattctttgccctttgcctttgtaatggagcgattatcgatcaaaatttcgccactggtgatttcgtgcaagcggttgatggaacgcagcatggttgatttccccgcaccagacaacccaacaacgatcacaaactccccttgatcgatgtcaatattcaaatcttttaaccccagcacaccgtttggatattcttttgtcacatttctaaacgaaatgatctttttatttgctaacgccatggttctcctactttctctcattaaactacttttataaaattgaaaagggtatctgttgatacgataccctttctctgccgcttattgtcctacttgttctgcatattcacgaacgatatcaaaattactgtcttgggagactacatagccttcatgagagtagatatctgaaatgatttgatgaccttcttcatctttaccaatttcgataaaggcatcttggatttttttgtcccattcctcactcatatcactgcgaacactaatggtgtcattcgggattggttctgtgaaatacataggttccacgtcattcatgattttaggatagtcttttttcactgtatttcgcgcatcttcaaaaacgaaagccgcatctacatctccgttcaagacagccaaaactgcttggtcatgacctttgacttgaactgtcgttacatctttattgatgtctatcccttctttttgaagttccgcaactggccaaacatacccagccgaagaggttacatcttgtgtagcgatcgttttccctttcaaatcagctaattccttgatatcgctgccgctcttgaccacaaccattgatcgatagctatccaccaattcatctgtcgcttcaccaccaggctgcttgattccatatcgctgtgcctgcagtaatacttttacattgctttgttcatgagccaaaacataagcatttggaggcaaaaagcccacatccacttgcttagaagccattgcttcgacgatcgtattgtaatctgttgaaacacttacggtaactggaattcctaatttatcacttagcagcttttcaagcggtttcgctttagcctctaacgtttctgctgcttgcgagggcacaaattgaactgtcaacttttctggaacatattgttcctctgcactcgaactagattctcccgctccgcaagctgctaatgccaatccagttgctaaccctaatccaacgattcctacctttttccaaagcttcattcttcttctcctttgtgttaaaaatcagaacaaccaattaacgaactttacctttttgattatagaaaaacgtacatttaattacaactattttttcactataaatggatattttttagtaaaatcaatctaatcacgaacattaacttgtgtaccttttctcaatcaaagagtatttcacagtctgtcaattgctttgctctactttaaaaagagtaccaaagcaatttattgtttgtatttacaacacgtaaagtttctgttaatcctctcgaagatagttgtgatctattggacatgtcatcaatcaggaaattctctacttttgaggctataattctctcttcacatctaccggtaactagtttgaccaagattaccaaaacaaaagtttgaagagacagatcgaaaagacgatcgcctattcttccccggacttacaacagcagtctttcaagtgcaaaaaaactcatggctgtcggctcctcacatccaacaccaccatgagtttattttcaaccagattatctccattctttcaacaacacggtctcatcatttacaaactctccagttgcaacaaatccaaaaccttcgtacatttgtttagcgatcgtattttctttaacggaagaaattcgtagttcttttgcttggatcgcctgccggaaccattcaatcgctgcttccattgcctgtgatccatatcctttttgctgaaagcgatgatcaatcataaaacgctcgatccaccatgattcttttgcataatcttcatccgcttcgtaataactaaacaataagaaaccgatcatttcttcttgatgataaatcgcaaaagcctgccgagcttcttcatatacagcttccagcaaagaataccaattaggcgcaacaaatttttcttgttctttggttgtttttagttcaatacagccacgataattctcttttgtgattggttttagccggatcatttcagacctcctctaattaaatcgctttcaaacaaaccgaataaaaaagatgacttactaaggatatagtaaatcatctaactgtattattaagcttcttgcgctaccgggtatacagaaacttgctttttgtcgcggcctttacgttcgaaacgaacaacaccgtcaacttttgcaaataatgtatcatctccaccgatacctacgtttactcctgggtaaattttagtaccgcgttggcgataaaggattgatccacctgaaacagtttgaccatcagcacgtttagcacctaaacgttttgattgagagtcgcgtccgttagaagtagaaccgccaccttttttgtgagcgaagaattgcaaattcattttcatcaacatgagatgcacctcctagttttctttgattgttttgatttggatataatcgctgtattcttcttgaacagattgcagaccaatcaatagattctctaaaagaatctgagagatattcgactgctcttgggtcaaacgaggaacaagtttaacaagaaggtagccaccttcttcattgttcgcttcaacgattggtgttacaccagccaaagcatcgatcccatttaccgcactgatcgctaatgctgaagcagctgcgcagacgatgtctttgccatattctcctgcttgcgcgtgaccggtaagttcaaaagaaacaatccgaccagagtcattacgcttgaatgtccctttgatcatattcgttaccctacttttcgtaagaattatgcattgattgcgtcaataacaacttttgtgtaaggttgacggtgaccttgtttgcggtgtgaatgttttttaggtttgtatttgaaagttacgactttcttttgtttgccgtgtttttctacagttccttcaacagttgcaccagcaatgattggggcacctacttttgttgattcgccacctactaagatcacttcatcaaaagtaactttttgtccagcttctacatctaatttttcaacatagattgcttgacccacttcaacttttacttgtttaccaccagttttgataattgcgtacatgctctaaagcacctccttctattatacttagactcgccatcccaagtgactttcgtacttaataacttgttctgtgcggttgtagctgtggagtccacaattacaacagattaactttatcaaaatgtttccgtaaagtcaatgaaaaataatgatttattttcgtcatgccgctttactattttttttaagtaagttgttttactatagaagaaagaaacaaatgaggtgttaaaatgaactacccaaaaaaactagctgagccaatcattgaacaatcaaaagcctatcaacttgaaggttttgttcctggtcaaggaccgcttcatcccaaattaatgatcgttggtgaagcacctggacggaccgaaatcgagaattttattcctttcagtggccaagcaggcaaagaactgatggcctctttggcgttagtcggactgacacgtgaagaggtatatatcacgagtgcagtacggagccgtccctattcgatcaaagaacgaatcaacaaacgaagtggcgcacatgaagtagtgcaccccaatcgaacgccaacaaaaaaagaagtcttgttgcatgcgcctttattggattacgaaatccaaaaggtggatccgcctttgattgctacggttggaaacatcgggttacaaagattattaggcaatcgctattccattacaaatgttcatgggcagccaatcagaagtgcgatccaacagttgaatgctgaaaaaaatggttatacgtggtctgacaaacaatacctgattgttccaatgtatcatcccgctgccattttttataatcgaacattggctgagcggatccatcaagattggtctggcttgaatcgcatcagagagcatggcttgcactagcatctcgcaattctgtcttttagttgcggcgataatgagggattgttttttcataagcagtgattttttcttcttcttgcaacgtgatgccaatctcatctaatccattgaccagtttatgcttccatgttgcatcgatctcaaaaggatagaccgtttgtttgacagttacgtgctgtttgggaagatcaatagcgatcctctcatcaggagccaatgctgccaatacttgacgagcagaaagcgataaaacgataggcagcaagccgtttttcgttgcattcatataaaaaatatcgctaaaactgccggcaatcactgcacgaaagccgtagtccatcagcgcccaagccgcatgttcacgcgaagaaccagaaccaaaattatctccagaaatgaggatagatgcttctttgtattctggaaagttcaaaataaattcaggatttgaacggcgatttgataaatagcgccagtcatcaaaaaggtattgaccaaatcctgtcttttcaacccgttttaaataatttttcggtaaaatttgatccgtatcaatattatcattcattaatgggatcgttttcccttgatagtaagtgaaggcttccattaatttttcctcccgacgatttctcgaacatctacaaagcgtccataaacagcggcagccgcagccattgctggactgcataaatgggtacgggcattcttaccttgacgtccaacgaagttccgatttgatgtagaagcacaatggacgcccgctggtactttatctggattcatgcctaggcacatggaacaaccaggctctcgccattcgaaacctgcatctttaaagatctgatctaaccccagtttttctgccgcttttctaactggacgtgatcctggaaccacgatgcctgtgaccccatctttgattttttttccttccaaaatagttgcggcttcttgcaagtcagagagtcgaccatttgtgcaggaaccgataaaaatatattcaattggaatatcttcggctcgctgtccagggtgcaatgccatatattgataagcttgttcatcattatggtcacgaatttcaggaaagactccactgataggcactcccatctcaggattggttccccacgtaatataaggttccagctgagaggcatcaagagtcagttgggtatcaaaaacagcctcttcgtcggtttttagcgtttgccagtctgcaattgcgtcagcgagctctttgggtgcatattcccgacccgcgacataagcaaaggttgtttcatcaggggcaatcagccctatcttcgccccaccttcaatcgacatattacaaatcgtcatgcgctcctccattgacagattccggattgtttctccataaaattcaatggcatgacctactccaaaatccgtaccgtgagtggcgatcagggcaagaatgatatctttagcgtagacgcctggttgcaaagttcccttgatctcaatccccatacgttttggtttcgtttgccaaatcgtttgagttgcaaaaacatgctccacctcacttgtgccaataccaaaagcgatagctccaaacgcaccatgtgtggctgtatgtgagtctccacaaacgatcgtcttccccggttgtgtcagaccggtttccgggccaaccatgtgtacgattccttgtcgggctgagccattgtcacataactgtatcccaaatgcttggcagttgttgcgcagtgtatctatctgtttctttgcaaccaaatccgtgatcgtaaaaatatctttagtcgggacattgtggtccatcgttgcaaaggtcttttcagggcaacgaacacgccggccagcttgcctcagtccttcaaaagcttgaggagaagtcacttcatggatcagatgcagatcgatatataacagctgtgcctcaccttcttccagcactacatgacgttcccagagtttgtcaaataatgttttccccattcagtagccccctaattttttgattaccgcattcgtaaattctgttgtagtagtattccctccaagatcacaagtcacgaccccatcttccatcacttgatagcacgcctgctccatctgatcagcaattgatttcatcccaaaagaagttagcatcatccccacagacagaatcattgaaatgggattagcaatatctttgccggcaatatccggtgctgaaccgtgaatcggttcatacagtgaaaccccagaaagactatgacttgcactagccaaaacacctaatgatcctggtaggactgacgcctcatcgctgagaatatcgccaaaaagattttcagtcacaatcacatcgaatacagttggctgttgcaagatcttcatagcggcagaatcaacatattgatgtgttaactgacaatcgggaaattcttgcgctacttcattcgccacctttcgccataatttgcttgttgccaaaacattggccttgtccacggacactactcgccgttgtctagttcgtgcgatctgaaacgcctttcgtaagatacggcgaatctcttccctatggtaataattcagatccgaagcctctgttgccgatagctttttttctccaaaataaatgccgctcgtcaattctcttaccagtaccagatcggttcctttaacgatctgctctttcaaaggagaaaagggtaaaaaagcatccgttactttgatggggcgaatgttggcataaagatcaagcgcgcgccgcaagtccaataaacctttttccggtgtataagctgcattttcccacttgggatccccaatggctccgagcaaaatggcatccgcttgctgacaagcttgcaatgttgtttttggcagtggtgtgccatactgctcaatggcttgtccgccaaatgcataagactcaaaagagaaatacgggttgcttggcaaacacgcctttacaatttgcaatgcactggtcatgatctccggtccgatgccatcaccagcaagaacgacgattttcttcatttattctcgcctcgattcttcaaagcagcgctggcttgtacataggcttttgcagaagcttgcaacacatcaaaatcaacaccgatcccactgatttgtcggtttgtctctgcgcattcgatagctacatgaacttctgcttgcgcatcttctccactcgtaagagccgtgatttcataatttagcagtcgcggttgctgatcaaaaatctggtcgatcgaattatagattgcttgaatgctcccagcgccaattgctgaggcaacataagattgatgatcttttgtgatcgataccacggcaccttgatgaccattggagacatattgtagctgaacagcctctaattcaacgccctctgtttgcgtgcgaccttgatccgctgctaacgccagcaaatcctgctccgttacttgtttctttttgtctgccagttctttgaatcgtttgaacaatgcatttgtttcctcagagtcaaactgatagcctaattgattcatcttttctataaacgcatgccgaccagataattttcccagcggtagcgaatttgtttgaacaccgactaattgcggcgtaatgatctcgtatgtctcaggattcttcaagacgccgtcttgatggatgcccgattcatgtgcataggcgtttcctccaacgatcgctttattcttaggaacagcgatccctgatagtcgagcgactaggtcactggttcgtttggtttcgcctaactgtatattcgttgtgcagtcatagaaatcttgacgcacatgcaatgctaatgccacctcttccaacgccgtgtttccggcccgttcaccaatgccattgatcgttccttccacacgagtggctccgttctcaatagctgccagagcattcgccgttgccattcccagatcatcgtgacagtgggaggaaaacataatcggttccttgcttttggtattggcaatcaaataggcaaataattcgccataggcagtgggattactatagccaacggtatctggaatattgatgatggtcgccccggcatcgatcgctgtttgaaccgcttctaacagaaaatctttttctgtgcgggtcgcatcttctggagaaaattgaaccttgtcaaataaggttctagcataggtaacatgttctttgattgctcggattacttcttctttagtcatggctaatttataacggcgatggacttcactggttgccaaaaacacatggatctggggacttactgcttgctttaatgcctcataagcgcgatcaatatctttaatttgacagcgtgccagacctgccactgtcatcgtggatacagcagttgcgattgcttgaaccgctgcaaggtctccttccgaagcaattggaaaacctgcctcaattgtatcaattccccatttttccagctgtaaagcaagctgtaccttttctttcgtattgaaattcactcctggagtctgttctccatctcgaagggtggtgtcaaaaaactggatctgtctcaaactgattcctcctctggctcatttgttcttttagggtataaaaaaagcactccataaaggtcttccctttatgcaatgcgaataggactcttctgtttcacgtcatcagatcatgaaatacaaaaaagagtcctcacggtaataataagttgctagtgttcatcggcctatttctattcattttattcacctgtcactttctgcttctcgttaccttatataagaagataccgaaagacactgcatctgtcaatgattttaattgaattttctgaatatttagatagataatattagagaaaaagaaataaaagtgtccttttctctcttcatatctcttagaagtaagaaattattttgaaatacgttcctttaaaacagatttttttcagcgaatactggttatatcttcacagactcttaacacaatttaaacattgctctgttagtatcattgtataccaaaaattatttttcaacctttctcccctaccagtcattcgactggtttttttgtcttactgagcaaaagatctgttcttttcccaagtagaaaggattgaactcaaagagagttatccgtataataagtaacagaaattatttaggaggatcaggatgcgtaacgaaatgatgcatcgtccagtagtaaaaaaagaactagtggcgtttatgcgggaaaaacaaaagcaattaactgggaaattaggtcaaatcgaacaggcagctcatgaaaaagaagttcctattattccgcatgagacagtggtgttcctgcaatttttattaggacaaatgaagcccaagcaaatattagaaatcggtacagcaatcggcttttcttcaagtttgatggcacagtatgtaggtgatggtcacgtaactaccatcgatcgctatgatgtcatgatcaaaaaagccagagaaacttacaaacaattgggccttgaggataaagtcactcttttagagggacaggcagcagacgttttgccgacacttgatggcccttacgattttattttcatggatagtgcaaagtctaaatacatcgaatttttaccggaatgcttacgacttttacgtaaaggcggcgtgttaatggtcgatgacgtctttcaggcaggaacgattttagatcctatagaagacattccacgaggacaacgggccatccaccgtaaactaaaccttttcctcaatacagtgatggatcatccccaactgacttctagcttaattcccttaggagatggcgttatccttattacgaaagaagcagatcatgtggacgtggctacaactagcgagtaacgagtcattttaaagaaagttggcaaaaatagcgaaaagcgattgacattaggcgctcctttttctataatgttatttgttgctgacttgtcatagtagctcagctggatagagcatccgccttctaagcggacggtcgggggttcgaatccctcctgtgacgttatttaaccgtcgagaacccttgttcttggcggtttttgtttgttcttgtgccaaatgtgtgccaaattgatttagtttttttgaaattaggctaactagaaagttgaattatatatataagcgccaaataagttatagattctttacctctttttctgatacaattaagaaaaaagaagaggagtttataacgaacatgaaaaaagtttatttgggtgtttttattggtatcaatttattattcttatcggcttgctcaagtcccgaagataagaaaacagttactcaaggttctgccactgctcaaaccgaatcaattgttgaatcttctgctgaaaatactactgaaagtagcaccgtagaaagcaatagtgccaccgtggaccgtgccgaatattcagcgaatttttcagaagattggaatggcctgaccacgaacatcaataaagtagtgattgtagaactatccgatgatgagattgaaatgcaaggtctagaaaataaatacgctgttcaagtatatttcgaaattaccaacaattcggacatggattttgatacttatccagaccaagcaacaatggttgtggaaggtcagcaaatcgaagctgagatgtttttaagtgatagtattggtggagaaatcttaagcggtgtaacaaaagaaggaattgtgacattttcagtacctaaaatagaagatgttagcaacgtttctaatattcgattgaaatggtctgctagctacgacaccgaaaattatgacgaggataattataaagattttgatgttacattcgatttaactaaataatcgatgagtggcagaacttatactaaggttgtttgatatgaataaaatcattaaaattgctcctaccttatttggtagagagctttttttattttctgttcgctttacaaaacgaacgtaagttcgtatactttccgtaaggagtgagctattatgggaagttttcgatacgaacttgagcccaaacgtgacattctttttattgatgtaaaatcattttatgcttcagttgaatgtgttcaacgtggatttcacccaatgaagaccatgttggttgtcatgtcccaatctgataatacaggaaacggactggttcttgctgcttctccattggcaaaaaagaaattgggaatctcaaacgttactcgtgctgataatttaccgaaccatccgctcctattcaaggtccctccacgcatgaacttatatataaaagaaaatctgaaagtaaacaatgtatttagaaaatatgtagccgatgaggatctactcctctactctattgatgaatcaatgatggacgtaactaaatcgctgaacttgtttgtgccagacaaaagcttgtctcgaagcgaaagacgatggcgactagctaagatgattcaacgtgatgtctatgacacgacaaagctatacgtgacggttgggattggagacaatcctcttttggccaaactagcattagacaacgaatcgaagcataataaatcacttattgcggaatggacctatcaagacgtggaaagcaaggtttggaacatctctcctatcacagaattttggggcattggatcacgcacacaaaaacgacttgagcgaatgggtatagaaacgattgagcaacttgcgaaggttaatcctgatttgttgcgaagtcgaatgggaattattggtgagcagttatatcatcacgctaatggaattgatcgaacaataatctctgagccagctcctcagacgagagacaagagttatggtaatagccaagtactaaacagaaattattatctccaagatgaaatcgagattgttgttaaagagatggctgaacaggttgctgcacgtattcgtagacatcactgccaaacttcttgtgtttccatttacattggtgttgcttttggagaaacacaaaaagggttctcacgacagatgacggtcccacctactgataacacaaagaagctagttgaacattgcctttttttatttcgtaaatattatactggtcaagtcgtccgtcatgtaggtatcacctattcaaagttaatttacacatcaagtattcagcttgatttatttgctgatgctgaggagcagataaagcagattaaactggataaaatcatcgataaaatacgtgaaaagtacggatttacttctagttttgataacttctcattttttgttaacccatcaccaatatctaaataatgtaaaattccttgttgttttttcgatgtatctttaaccaaaataactattgttactcccgtcatgatatcaaaaatatttcctccttcaatttttgattgttctttagttttccctctaatggctccttttaggttcaaaatataaatagcagaaaattcgtctatcaaagatttacgcattccatccatggcatttccatctataaatgaattattagtaatgaaaccaataaccccattttctttgatttggttgctagcccaacgaattgcacgaatatacgaatcaattatccagaaggataaaactcatgaacttccttaattgaaattacttaggtgaacccgtattcaaaaaacgttgttttaccgctaaggacccttggccttagcggtttttgttttgctttgtgcccaatataaatcaaagatgcactctttgttcaaccaaaaagtgcatcttatcaaactagcaagttcttttattttttcatctcacgaatgtccgagttatcacgaaaaaactgtaacacacggattcataaatcaattatctaaagacgttggtcattgctgctagtcatcaatcatcttctgtcgtatttcttagcaataaaaaccaacttctctttcgatcacgtcatccaagcgatacgtacgctaccgttgttctctgaaagttatttaccgattaattagcaacgtgtatttgctgttgttcaactaacggataactaatcagtttttcactgtctaggtcttctttatgcatatctacggcgacgatttgactattttcataggtccgatagtaataaatccctttgtcgacattgcagcaagaagaataaatggtatattcatatttcccgtctcccacatcacataatcctttttgctgttcgacagaccctaaaatatggaaaaattggctgatactttctgattctgaatcaccagatacagaattcagttttgtgaatgcagccttcacaaatcgagacatcgaggacaaatccccaggcaacccaattccgcccattcctcgactatactcattcaattcgattgcatctgagaaggtattggttggcgttttactagataaagaacgatagttatttaaattaaacaaatgatagtcaaaagaaggattgttcgttaggacaccaacaggattatcatagatatgaagtccgtctttcatactttctacaacgattgaagactctttatccgctaataaccagtgtaaaggcgacagcggaagattttcgctaaaattgatattaaccaaattgattttattcaacaattcttttgcttcagctactgtgctgcattgccctaatatccagggaatgaattcaaatggtgtgacattgtctttattctcaaccggttctttgtaatctgcaaaaccagcaaaatttaacccagccatgcttaaacctttttcattggtagcatcataatacagcggataatccgctataccagcagcaatcccgatcatcgcataatgctgtgataactcaccaacttttcgaaaagacagcttatagttcctaggagtaatcgtgactacttcttcataagacagctcataatcaaagtttctaccaaaatagtgatctcgcgttgaataagtaattgatgtacacatattttttcctcctaatgttctttttttcacttatattttactcctattcacttttttttcaaaagaaatgattgtgtctcgaactcagttcttttattggttataatcatctctaggaaaatgaacgttaacaagtactctattcgtacttttcaataaaacttatcgttgttacactagatttcatacctatcgtaaaaaagcattaattatcaaaaaaccttccaataaaagatgtattctacatacaaggaggcagtgaggtgattatggattatacaaaagacattcaactggcattactctacattgaaaataatttgactggcgatctctcctcaaaagaaattgcaaaaaaagccggcatgtcagaatttcattttcagcgtgtatttaaaaaacaactgggcatgggagtatataaatatcttcaaaaaagacgtatggcccatgcttccctactacttttgaagagcgaattgaagattatcgaaattgctctgatcagcggtttttcctcacaagaggcgttttccagagtttttaagtcctattatcaactccctcctcgacaatatagaatccaatttaaaaacttttttagggggaatcaaaaaatgtgtgagacaaaaataaatggctggttgctttctggaaataattttgacaaatatgaagtgacaattgatcaaatgaattttcatagtggaaatcagtcagtaaaaatgagccaaacagagagcttatacacagagaattttgcaactgttatgcaacaagtgagtgcaaaaaattacattaatcaacgtgtgcgattaagcgcgtacctaaaatcagaatcaattgaaggttggggaggaatttggttgagaattgatggcaagaattttgaacaattagcgttcgataatatgcagaatcgtccagtaacaggcacaaatgattggaattattattcttctgtcttagatgtctcacaggaagctgaagttttaaattttgggtttttgttgcagggaaaaggcactttgtgggctgatgatttttgtttagaaatcgttcccaatgatattcaaacaaccgaatttaatagtgaacagtattacccaacggaacccaaaaacttgtcgttttcggaataagaatagttaataaatgagctacagtagaattcaagatgccacaagaccttatggaatactactgtgcttgaaggatccaagcaaaaatcctgctcccctccttttcttatacgaaaaagaaatagcattctgaatcaatgcgaggtaaaataaaagaaaactttttaccaatcagcttattctgaatcggagaggaagctttctatggatacaatgatgaaaagtatcattacagaaaaagatttattacggcagatcctgcttctcgaagagttatccaatcacaaaacgattacggcaaaggcattggctgcttcgattcaaactacagagcggactgtctttacagatattcagtatattcgagagcatttgcctgacggatgggaaatcgaagcgacaagtaatggcttttctttacttaaaaaagattcccaactaaccaatcaattatgggaaagcttcttgccgctttcaattggcgctatgttgatcaaacagttattctttgcaaaaggaatctcaacacaatctttcttgcatgacagtggtatctcttttgaaacattgaaacgtcatgttacaaaaatcaaccgtggcattaaaccatacaatattcgaattcagttgaacgccaagcaagtcaaactgtcaggtagtgagatcagcattcgagttttcttccatcgtctgctgctgccttttacccacaataattatttctttgaagattatgctattcatgaatcacattatcttatctttttacagtcactgaaacgtcaagagttggacgttctttctgaagaaatttttggcacttgctggttcttcatcaatacaatccgaatcaaagccaattgtcgggtcaatgcactcgcttttgatcctttagatccgctttttttacaatatcatcagtcgctccagcaagtttatcaaaaagaaggcgtctatttgaatcaggaggagtgtttctttagtttctattgttttctggaaagttggaattacaacaatcagtggacaagcaaaattgctgtcacactagatgcctatcaggaaatcaaacaatccgtccagcgatttgttcaagaacttgggcaagaattggcgattcccctactttctgaaacccagttagcggacaatttgctgcttttggtcttaaaattcaatgaatccgcaaaactgtctgaacaatttcaattagagtatcaagaaatgatgcacattcgtcaacacaactatcaagcaatttttgaacgattacggaaatttatcttagatccaaaatttgccattgtaaccgatgaacctaagtatatcttgaatatggcttcactcctcgtacaacaagctgtgcttcaggcacgaccagtaacgacccgagctttcttcttctttcaaggagaaccagcatggaaagttttcttgcaacaggaaataagtgattatttgggttctaggatcgaattagtcccagtcgaaccagctgaattcgcagggatgactactcgaaatgacgacttcattatttcgaacgtccctttggatgatcccaaattaccagtcttctatctttcaatgctgccaactaaaaatgagctcaatcaattgactgagctcatccaaacctattatctgatcaaccaatgacttagcttaattcattggttgtttttgtattttgccgattggcgcgccgcttcattagatgcttttcaacttcaaccaccgcaaagagtaagaagccatttaccgcgatactaagatgctgtacaagcgtcaatgtagttgtcccaatcagttgctgcgcaactggcaacaccagaaccattccttgcaagatcaccaagattcctagagaaatgaacagtgcccgattttggaacatactcttgttcaatgctggctctaaaagctcccgacaattcaacatgtatactgcttgtcctaatacgatgttctgcaggagaatcgtttgctggactgcttgcccttcaaattgcatggacaaaaagtaagcaggaatcatgatcagtagagaaacatagacgattcggaacatgctgtacatggaaagaattccttcattgactggacgtggcggccgatccatcacatctttactcgctttttcgaatcctagtgcataagacaatgtaattgttgttaccatattgacccagaggatctgaactggagtcaaaggtaatgggcgatttaacaagagagcaaaaatgacaatcaatccttgcgctaatgctgttggcaaaaagaagttgatggtttttttcagattgtcaaagatccgtcgcccttctttgactgcattcgcgattgtatggaagttatcatctgccaaaaccatatcggctgcttgcttgcttacttcacttcctttgatccccatagcgatcccgatatctgcttttttcaaggcgggagcatcattgacaccgtctccggtcatacctacgatctcaccattattttgtagagcggtcacaattcgtagcttgtgctctggcgtcgtccgagcaaaaacatccacgtgattgacttgctgtgccaactcctcatcggtcatttggtcgatatctaatccttcaagaactttcttcgtatgtttcaacccgacttgctcgccgatggcttgcgccgtttctttgtggtctcctgtgatcattttgactctgatccccgcttgtaaggactctctcactgctttgattgcactgtcttttggcggatcaatgattcctgcaagacctatgaagactaaatcagtgacttcttcatgagcaacttgactggatgctggaactgtcttgtatgcgaaccctaagacccgctgtcctttctgtgctagctcagaagccgcttgctgccaataggatacttgatcttctgatagctgacttttatttagcaaaacttctggagcgccttttacatataagattgattgatcctcttgcaaaggatgcaaagttgccatgtacttgtaagtagagctaaaaggaatttttgctgcaacttgttgcaagggtaattcctgagtctccacaaactgcagcagcgcccgctcagtaggattaccttgcaaatctgctgcccgctgagaactatcttgtttcagatcttgacaatttgccatgatatcgtacatgagcgcttgctctttttcggttacagtgacagtatctacaacggtcatttcattttttgtcaacgttcctgttttgtccgaacaaatgactgtcattgcaccaagcgtttccaccgacggcatcgtcttgatgattgcttgctgatctgccatttctttgacacccattgacaaaatcatggttaaaacagctggtaatccttccggaaccattgctacgattaacgcgatcactgaggaaaacaacacgtttagttctagaccataccggaatgcggtaaagaaaattaagaagagaatcagcgcgacaataccgcgaaaaatctgcttgttcaactgatgcattttctttaccaacggtgtctcttgtgatttcactgactgcaaagcttgattgatcttaccgatttctgtctcgtcgccagttgctactaccacaccgatagctgacccactttgaacacgtgtaccagagaagaccatgttcttttgatctccaataatactgttttctgtgatgacgtgttctgttttcttgactggctcagattctccagttaagatcgactcttctacgaccaatccatgattttcgatcaatcgcatatccgctggtacgacatcgcccgccttcaatgagactaaatctccttgaacgatcgactctgcggcaacagtttgctgcagtccttccacaatgactacggcttcttggcccatcatttgttttaagccgtccaaagattcttccgcttttcgttcctgccagtaacccacaatgccgttgatgataacaactagaagaatgataccactttctacataatcacctgtaacagcctttaaagctgcagcaaccatcaacacgatcatcaacaaatccgtaaaatgttttgcgattttttgccaagttttgatttgaactttttctgcaatgcgatttgcaccatctgcttctaaccgtgcctgacgttctttatttgaaagtccctgacgatcggactgtagctgcttcatcaattgttcttttgaaatttgataccacttcattgtcattccccctaatgtctttttagctttcgcttgtctataagtataggggggattcttaaaaataaacggtcgattatttcagtctaatatgaaaaaaatgcccattaaaaaaatgctctattagaaagatccatttcctccaccatcaccatgattcgctcttgtgattttttcatgaaacatcgcgatagcctgtgcggtttctgccatatttgcgagcgttacactttttttcattgcttcatcaagaagaagtgggcctggttgaatactgaaaataccagcaaaatactgaccgatctctcctagatcaggctccctttgcccacacaatgcaacaactggaatagcatggggctgtgcgattttggccacacctaatggcacttttccggctgcagtttgacggtcaaaacggccttcaccggtgatgatcaacgtagcatcactgattctagtctctaatttcaacagtttcgcaatggtcataaatccaggacagatctgtccccctagtaagaccgtcgcaccgccgatacctccagcagcacccgttccagcgatcccatttaaatcaatttggtattcttgctgcacgaaatacgctactttttttgcttgctgctccaatacctgtaccgtttgaggtaaagcacctttctgaggtccgaaagtagttgcaaatccttcagctccagtataaggattagttacatctgctaaaaccaacagttcgataccagaaagcagtttctgcactgctgttatcgaaaaataatttatggtcaacaaaggattgcgcgcatctgccgcaggttgatacattagttccgcacctaatgcttccagtaaacccagtccgccatctgttgttgcactgccacctaacgttacatagatctgtgctactttttcattgattgcatctgcgatcaaaagacctagcccgtaggaactagcctgtctggttgtttgatctgaaggatcaagtaattggataccgatgattgctgcacattcaataatcgctattcgcttttgattgattgttgtcagtaaatacgaaactactcgttcttctcctaggggaccgacacttgttacggatttatactgtcctccataggcagcaaataacgcagccattgttccttctccaccatctgcgatggggattgattctttttcccattgtactggaaaccctttaagtgctgcctgatttaattcttccgaggtagcactccctttaaatgagtcaatcattgctatcactttcatatcgaaccctcacctcgttttctttcattaaacactgaaatacgtcttacaacaagaaaaaagagtgttgctactctttatcaacccatggttaactttatcaatcaaaagttaacttgttctccattgtgctcctctctttcctgttctacaataaagctagccaattcaatggaggtgcgtcatggaattaccaattggacaggaaatagctaagagaagaaaggacaaacaaatcactcaaacagagctagctgattttatgagtgtttctaaggcctcggtttctaaatgggagacgggccaatcttatccagatattaccttgttgccactcctggctgctttctttgattgcagcgtcgatgatcttttagtgatcaattctcagctaacaactcaagaaatcaagcggatttaccagttgttgaaagactcgtttgaaactaaatccgctgatgacatgttacttatgctgagaggattcattcgccgttattattcctgctatccatttctgctgcagatgggacttttttatctgaatcattgggatctgttgcctattccagctcaagttactaggacagaacaagtaccaaataatgagaaaactgttgaggatcaacgaaagtattacttacaagaggcggttaaattatttgaattagtcaaaactaacggttccgctgacctcctgcaacaagctagctattatgaagcctattcaatgcttatgcttggtcaggcagaggacgttttaggtgtattaggaaataagacacccgttttcttgccagtggaatctttgattgcagctgcgcaccaacaaatggcagatggctcagccgcagaaactgttcttcaaagtgccatttatcaatatgtcacagttttactcagtctgttgactaactacacgcttttgctgaccaaaaaaccccaagctatggaagcaacttaccaacgagggctggccttttgtgaaacatttgacttatccagactacatccagtcattatgctcaattttttggctgcctgtttgaccacttttgctgtacaagacaatagtgcccgcttgctttgcgctttgactcgttatgtctcattgctggaaaaaacagaagatccttatctccttcatggtgatgcgtactttgatcagatcgaaagttggattgatgagttggaacttggaaatcagatgccccgtagttctaatatggtaaaaaaacaattgacagggctgattcttgaatcacccctattgcagcccttcaaagatcaacaatcatttacagaattattccagcgcttgcaagcagtagccgcccatactgcagatgacactcatggaaaggaggaaacacgatgatgaccacgagcattccagaaaatattggtgactatctacccattctgatcccattagcacttttgcaattcgggttgatacttgttgctgttttagatatcgttaaacagaaacactttaaattcggcaaccgcacgttatggatacttgtttcttgtttgattagtattatcggaccaattttgtatttcacttttgggaaaggagaaaaagaatgaacgtcattgagatcaatcaattatctaagtcttttggcgaaagaaaaattctagatgccatttcttttgtcgttcccaaagggagtgttgtcggctttgtcggggaaaatggtgctggtaaaacaacaacgatgaagctgattttaggcttgctaaagtcagatagtgggcagatcacggtctgcgatgagccggttgtctatggaaatgctcaaacaaaccgtaagataggctacttaccggatgttccccaattctattctttcatgaccgcaacagaatacctgcatttttgcggaaaaataagcggtcttggcaaacagctgactagccgaatcgatgagattcttcagctggtcaatcttgaaaaaaataccaaaaaaatcagcagctactcacgggggatgaagcaacggctgggtctagcacaagctttattgtcaaaaccagaaatattgatttgtgatgagccgacttctgcgctggacccgctgggacgcaaagcctttctagatcttttacttgccatcaaacaagaaacgacagttcttttttcttcacatattttatcggatgttgaacaaatttcggattacgtggcgattttacatcagggaaagatcaaactctttggtgaaatagaggaattaaagacacaatttcgtcaagaagattatcttcttcaatttgccacctcacaagaaacagagcatttctgtcagctcgcgaaaggtgcggcgattaattggacgagggaaaaacatcaactgattattccagaaaatcaaacttttcaacaaggccaaaaagtgctgcaactcatggctgaaaatgaattggtccccttactcttccaaaaaaatgaatcctcgctagaaaaaatctatttggaggtagttaaatgacgcagctaacagtttttttaagaaaagaagtattaggcggctggcggaataaaaagatcatcatttgtggagtgatttttctgatggtgggcatgctctcgccttttttggcaaaaataatgccggatatcttttcttccatggtgacagatgggatccaaatcactgtttccacgccgacatctgtcgattcgtggatgcaattttatggcaatatcggttcattgggtctcttggtttttgtgatactctttgcggatacgatttgtgcggaaattgagcaaggaactctgatcaatctaatcacaaagggattgccaagacaaacgattcttttagcaaaaacactttatctttatttcctttggacacttttctatgctgccgcttttctcatttgtcttctttatacaagaatttatttcaatgactctttgacccatcatcttatcagtgcgggttttagttattggttatttgggctattgtcaatcagcttactgctgttaagctccgcatttgctaaaaatgtttaccaagtcttactctttttagctgctttttatggtattggcgtattgggcagtctctttgaatctctccaaaagatcaatccttattcattgtccagccagacaattgcttatattcaaggaaattcagagctgatggacttcttaccagctgttctgatagctgtagtcggatcgtttctgtcattaatcattggtcgttcgatttttcaaaaaagaaagctttagactaatttgattatttctgggaagtagtaaaataacagcctctctgacaattgatgtcagagaggctgttattttgaataagtgatttttttagtcccgacagtcctctcaatctctcttcgcgaacgcaattatcaacaaagggaatcgaagagaggttccctcatccagccgttcttttttctttgacaggagcggatgcaagtgtggactcctttgcttcctttcttttgacaaattgacgctgccctttgagcaagatactcataaagaaagcaatgagatagatcgagcaagcagaaatgatcgcttctctcagtccaaagactagaaagttcaaaacaatgatcgttgtattggtcaagaagatcccgactgctttttttatgccgaaatatttttcaaaaatcaacggtgggatcgtgactcccccattggatgcaccgatacagtaaagggaaaatatccctaagctaaagaagaagcttcctagaatcaaagaggctgggtaaaattcccaaaccatccattcaggaatccatgctaacatcacaggaaacaacaggcttccaaagacggtattgataaagactttccgctctaaaaaaagaaacgctagtcctaacataatcaagttgattccccagacaatcagatggcgatcaatggctaatcctgtttctataagatacccgattgagcccaccccggccgaggcaatgctgtgaggtaaaagaaagaagttcaatgcaatacagatccataacacccctaatgaaatcaagcctattcgtttgatagtcatccacctgtttcctttctgtatttcaatctatcgatcttcttgatattgctgccattttaacaaaaaaagcagcagaaagaagagtcaaatttttcatgtcgctatgaaaaatttgactcttctggtaatcgctaaaacgacaacctttatttaattcaacggatttttttataacaaatgattcgaaatagacaaagttctcttagccaagaaagttggctgctcactgatttgcgcaagtagatctgctacttgtaattcgacttctcttggctgattgtccttgctcgtttccagatcagattcaggtgaacactcatgcaaaaaagcaggaagatgcaaaatcgtatagtcacacatcgcttcttcaatcatccgaatagataatgtcatttgactgcttcgagctttcttgtgcgtcgtttttgtttccgggatttgatctgacaggaagctttcctctggtttcaccaggcaaacgattcgggttaagtcaagtagtttcatcgcttctatgattcgccaggtgacttgtggctcaggcatctcacaaaggcaaacgatttcacaaccaatcattcctcgcaagatcctgcctagatctagtaaatcaccttgaaacatgctttctcgttgaggatcaagcaatgtcgtctgattcttttttggcacgtacaaaacaagcgtctcgtctctcgctaataattgttttctgataacagaagaaaggggatcttgggtaccgaaaatcattacttttgtcatacgattcctttcctatttcggctgtatcctaaaagggattgcgtgtaattgcaaaattaattcgtaaacgtttctttgcgtaaccgagcttcagcaggaatgatgtggtcatcataatgttccaatttgtattccaatcgttctaccgcttctgtcatggttgcaattcgttcatgcaacgctgcgatttgctctgctagcaattgttttctttgaggaactgtctgactcccttcacgaaataacgccaaataggttgacaaagcctcaatcgaaagtcctgcttttctcatcttactggtaaactcgatccacttgagatcttcttcatcaaagactcgaacaccatgagcattgcgtttgactggtggtagaagggcaatcttttcatagtagcggatcgtatctgcagaaagaccgctaagttcacttatttttttgatattcacatagattcctcctgctattcctacgatatttctctagtaaaatcaattggcgcctacaaccgcatgcggaagataaggttcttctaagtaagcaacttcttctgtggatagcttcaactcaatggctggcaaagcatccagtaaatgactttcttttgtcgccccaatgattggtgccacgactgattctttttgcaatagccatgccaaggccacttgtgctcgtttgacttgacgtgtctcagcaatctctgccacacggcgaacgatcaattgatcttgttctttagtctgatcatattttgattgtgctgttttatctgtcgcaaaacgtttcgtttgtgcatcccaatcacgagtcaaacgaccggcagctaatggactgtagggtgtgaccgcaattttttgatcatcacaaagggggagcatttcccgctcttcttctcgatacaataaattcaaatgattttgcatggaaacaaatttggtccagccatgtttatccgcaaccgcctgtgctttggcaaattgccaagcgtacattgctgaggcaccgatatagcgaactttccctgttttcactaaatcgtgaagtgcttccatcgtttcttcgatcggtgttgtataatcccagcgatgaataatgtagaggtctacatagtccatttgtaatcgttctaaactttgttcaatttcaaaaaagatcgctttgcgtgaaagcccaccgctattgggggcttttttcattttagaatagagcttggttgcgacgacgatttcatctcgtggggcaaaatcattcaacgcttttcccaatatttcttcgctggcaccataggaatagatattcgctgtgtcaaaaaaattgattcctagatcaagggcttttctgatgacttctcgactttccgtttcttccaatacccattcatgaaagccgcttttcggatcaccaaagcccattgcccctaaacaaaggggggagacttctaatccagtatgtccaaattttacataatccattgtcgttcctccttaagattgatacttctagcatacgccttcgagtgaactccaagtcaacccctttttaataattaaaaaaattcagattgatcgtcagctcacgataattcgtatcttgataattttcccgccaattattggcccgcttctcaaaatagtgttcggtttccttctgataaaaaattctcgctaaagaaattgcttggtcaaagcatccattgccctgtcctggttgtttttccagataaaaaagaattccttggttaaaaatataggtgattctggggcgcaataaaattgtgcgttcgtccagactctgccgatacagtttctggatctttctggctgctggaagattgcggtgaaacacatatttagaaaaaaagttctccaacagatcataataaagggcattggtttgcggaacactttggtacagcttggcttttttcaaaatgcttttcagtaatagatccatctgttctgtgtccaatgcaaaggtaaaaatactgatcaaacgcaactccatctcaccccaattattgacttgctggagatagctgagtactttttgagaatgaatgaatggacgattatttcctgcattgagtacatcttcaatgaaacagcctaaaaactgcggccaatcatacggactctgactttcagcaaagaaacgttgtgccaacgaacgagccgcctcttcttgattcgtattaagatactcctgcatctgctcgatagacttttcaaaacggtctttaaaagtctgtttcccaacaaattgaaactcctcgatcgtcacattgatattttgcaagcatgtaaaaaactgatcgaccgtcaacattgattttccattttcaaaacgtgaaagttgtgcacttgatatcccttgctgacatgcttccttcaaagtaatccctttttctaaacgcagtttcttaaatgtcgctccatagtccattcacagcacctctttacatatatgtaattattccttcgcttttactttacccttttacaataaaggtatcaagaaaggtaataagaaaggagcaaaaaataatgaaaaaggtgttattggtacattggaaaaatcagggggtcgtcctgcttttaatggcaggagtcgcactttcacaaacgatagccagcttgcaaaatgtgcaggttctaaacagtctcatccaattcgatcaaaaaggatttatccaaggtgttgtagggatggtcttagcctatagttgttttctgatgtttatttatctgcaaatccgttatacagcctatacatctcagaagatgtccctttatttgcgagatcaattattgactcggctacgatacagtgattatcagacattccacaaagttaccgtaggcaactatgcatcaaaattgagtaacgatataaccatgatcgaaacagatggcttcgccaatatctatcaggtcatgcaaggtgtattgtcttcactatttgccgttatcgcattagcccaatttcattggtcattgatcgtgctcaccttaggtcagtcctgtttgttgcttttgttgccgaaaatcttccaaaaaaagatgaaacaatctgctgtcgctactgctcaggcaaatgaagcttttttgagtaaaaccaacgaactgttagctggatttgatactttcctaaatttccagcgtcttgattttcttaaaaataaactcttgggttccgcacaaagaatccagtccgcaaagctaaaacaagcacaagtgatggctgctgtctctgtaactggcggaattggcaatgtgactggtcaattgagtgtcttaggttttactggctacttggcttttctgcaaatcgttcccatcggagcgattacagcaacaggaaatcttgcttcgacaatctttaatacattaggaaatatcagttcctatctgtcaaaaatacaaggcacattccctttattcgatgcatttgcttatgagaagccagcgcatgagatttcgctacccagcaaaaaaacaaacgatgcaaaagatcttgtgttggcacaagcttcttattgttatcaaacgaccgatggaaaaccgcaacgaatgttgttcaatctctcaaccacttttaaagctggacaaaagtatgccatcgtgggggaaagcggctcaggcaagtcaacattattcagtttgttgactggacggcgcaaagactatagcggatcgatccgcttgggagaaacggaaataaaagaattccctttagaagaattgcaagacaatgtgacagttattgatcaacgtccctttgtctatcaagcatcgattcgcgagaatctgacattaggacaattttttcccgatgaagaaatcgagcaagcgctaaaaaaagcggaactctttgcagttattgaacaactacctgagcagttagacacagttcttaccgaaacaggtggtaatctttcagggggacaattgcagcgtcttgcactagctagaggcttcctatggaaaaaacctattttgttagttgatgaaggaacctctaatcttgatcaagaaaatgctaaaaagatcgagaaattactgttgcaacaaccgcaaaccgtcctttttattacccaccaccttcgagacgaaatcgtccaaaagttagatggtgttctctcacttaccccctcctagcaaattgatcgcgatgactcttttatcaataggtcctatttgctaaactgaaagtagctgattcaacaaaaatcaatgctttgattcttaataaagcattgacttttgttgtgatgactttttgtctgctaaataagaaatgagccaatggaggtttttgatggtcaacccacagctaatgcattatttagaaacaacaatcattccacaatacaagcaatttgacacaagtcactcccctgagcacgtctatcaagtgctcgaaaacagtatagaaatcgctgccccattatcggttgacttagacattgtctctactgttgctgtctttcatgatcttggtctattaaaaggacgaaaaaatcatgaacgcgcttcaagatctatggtagaatcagatgcttttttggcggattactttaccaaagaacagcgtaaaataatcggagaagccgtcgaagatcatcgtgcttccctctcctatgagccacgatccatctatggcaaaatcatttcagaagctgatcgtgatcttgatttttatcggattctcgaacgcacgatttactttgccatcgaaaaaaagagtctttctgatcctgataatctttgccaagaggcatttgaatacattcagcaaaaatacggtccccaccatcacttgaccttttggctcggctattcaaaaaatatcgcaggcttagcagagatccatgaaatgctcacagatccgatcaaatttaacagcgctttttctgattgctatgaacaacgaatgaaaaagccgacttcttgagctaagacgtcaagatccggctttgtttcatttttctagtcgttcgatcatttctttcatcttttcaatttcttctttttgagtttggataatatcatccgctagttctttgacctcaggatctttgatggccgcattggtactggttaaaatagcaatcgaatgatgaggaatcattgctttcatccatttcacatcatcaacagccgtttgggagcgcaccatgaaaagtgaaccacagaatacgagtacactgacagctaaaatcgctagattccatttcttattttcgtacattttccacataaataagagcatgatcatcgccatcacggcccccatcatcaacgccataaataatcgagtctgactataaaagatatgatcccattgaaaaacattcaggtacatcatcccaaacatcacgaccgtcgatactaaaatcatcacaccaaaacgcacatactgtttcatttctatctcctctttccataaaaatatccactattagtctatcaggattgattgttcctactcaaacgaaacgcttaattgtgattaggagacgaagcattgttcactcttgcaagttttttcctggttcctctatggattgccaggtatcgggatttttgttctatcgcttttcctaggctttttttcagcttttctgtcagatctttgcaggaaggaagaatccatgccaaagcaataaattttgcagctgaataagaatgtggtaacttgattttatcacatgataaaatttctaggaggaagttgtatgtttttagcaataaatgaaatccgccattctaaattgcggtatgcactggttaccggtgtcatgtttttgatcgcttacttagtttttttcttgaccgggctagcctatggtcttgcccaagaaaaccgaactgctgtcgataaatggtcggcatcagagattttattagccgaggaagcgaataacaatttgaatatgtccatgatccctcgtaatctctatgatgaagtcaaagcagatgagaaagctgtattggctcaaactgcgggtgtgatcaccagggaatccggtggtgaaaaagttgatgtcagcttttttgggatcgaaccagatcaattcttggctcctaaactcacggaaggcgaacttttcgcgaacgacgatgaggcagttgctgacagcagtttgaaagaggaatacgacattaagatcggcgataccgtcaaattagccggcaatgaaaagaaactgaagatcgtcggctttacagaaaatgctcgcttcaatgtcgcacctgttctctacacgacgattggtgcctatcaagaaattcgctttgaaacaaaagataccagcgataaagcccgcatcaatgccatcgttacgcgaggaacagttgaagaagtaccggatgaattaacagcaaccaaaattagtgatttcatcaatgaattgcctggttatagtgctcaagtgctaacctttgggtttatgatcggcttcttgatcgtcattgctgccatcgttatcgggatctttatttatgtcttgactatgcagaaatctgatatttttggtgtcatgaaggcacaaggaatttctagtcgttacatcgcattttctgtcatcgcacaaactttccttttagcaacggtgggcgtattggtaggattagcggcgacgatcggaacggcgttggtcttgccgcaagctgtgccctttcaagtaaacagcctcttttttgcaggtattagtgtgttgatgattttgattgcgattgtcggtgctttcttctcagtaagaacgattgttaagattgacccattgaaagctattggataggaggataaaaatgagtgccattgaatttaaagatgtgaagaaaaccttcaaagatggagatacgatgattgaggctttgaaagagacaaacttttccgttgaaaaaggagaatttgtcgccatcattggaccctctggttcaggtaaaagtacttttttaactattgcgggaggattacaagcacctacagctggtgaagttttgatcaacgatcagccttttagtgaccagaaagaaaaaaatcgggccaaattacgattcaaagagatcggttttattcttcaagcttccaatcttgtcccattcttgaccgttaaaaagcaactgaaactagtcgacaaagtcagcaaagagaataaaacccaatctgcccaagatttatttacccaattaggaatcgataaattgcaaaacaaataccccgaagatctctccggtggtgaacgtcaacgggtggcgatcgctagagctttgtatcatgacccaacaattattttggcggatgaaccaacagccagtctggattccgaaaaagcctatgaagtagtcaaaattcttgcgcaagaaacaaaggaaaaaaataaagcgacgattatggtgacccatgatacccgactaactgattattgtgatcgggtgcttgtaatggaagacggtgtcttaaaggaaaaagaacacacaaaaacacaacacgattaatctgaagccaagaaatatttgataaggagttctcatgaaaaaaattatcgttgtcggcggcggtgtcgcaggactatccgccgctgtcagattgcaacaagcaggttatgcggtcacactatacgaaaaagaaagccagcccggtggcaaaatgaaccaaatcaagcaagctggttttacatttgatgtcggcccgaccattgttatgatgccggagatttatcgcgagatttttgaactatgcggtgtcgatccagatgactatatcccgatggaaaaggttgatcctatgctgcagctctactttgctgatgaagcacctctcaccttttccaatgatctgattgaactcactaaaacattagaagggatttctgaagaagatgcccaaggttatttcgcctttctggcagatatttataaacgctacgtgattgcaaaagaagctttcatcactaaatcgtttcgaggattctgggatttttataatcctcaatccctttgggcaggaatgaaattgaaaacattcaacgatgcctacacttcgatctcaaagtttgttaaagatgaccgcttgcgcaagtcgctagcctttcaaacattgtatatcggggtttctccctatcaagggccctctctttatacgatcatccctatgatcgagttgttctatggcgtctatttcatcaaaggcggtatgtatacattagcgacttcgctggctcgcttatttgaagaattaggcggcgtgattcattatgactcaccgatcgaagaattgatcattgaaaacaagcgagcaacagggattcgtctaaatgggcacatccattcagcagatgcgattgtctgtgcggctgattttccttatgcgatgcaagaattgattcctaatgaaaaaaatcggggcaaatacaccaataaaaaaatcagccgaatggcctattcttgttcgtgttttctcttgtacctagggctggataaaaaatatgaagccaatggcttgcatagcatctactttgccgaagacttcaaaaaaaatgtcgatgacctttttgagtttggtgttttgccagaagatccttccttttatctctatcgtcccacattgaaagatgcctcactagcacccgagggtcacgaaggcttgtatgtgttggttccagttcccgagctgtccaagtttaatgattggcaacctaatacaatcacgaattaccgcaacaaaattatccacacgctaaaagaaaaaacgattttcaatgatatcgatgagcatatcgtttttgaaacctactatacaccacaagatttcaaagaccactacaacgcttataacggggcgactttcggattgaaaccgacattatctcaaagcaattactatcgtcctcataataagtttgcttacgcagaaggtttgtatttttgtggcagcagcactcacccaggagccggtgtcccaatcgtgatgcaaagtgcaaagcttgccgtagaggagttactaaaagatgatcaataaggaaagcacgctttttgaacgatataaggaagactttgcttattgcgagcaaatcatcaaaaaacattcgaaaagtttctacagtgctttttcgcaattacccccagaaaaagcacgttccgtgtttgccgtctatgccttttgtcggcaagcagatgatgccatcgatcgttatcaagacatcgttaaattaaatgaactagaacacggattacgacaaatggcttgcggaaaggttctggatacccctttatggcgggctctttctgttgtctttgcgaaatatgatttacagttccagccattttatgatatgctcgcaggacagaggatggatctaaattttcagccacctgaaacggaggctgatttgagtagctacagctactctgttgctggaagtgtcgggttgatgttgctgccgattttatctagtcaggcaggcaagatccaagaaccggccaagaagctaggggaagctatgcagcgaacgaatattctccgggatattggggaagatcttgcgatgaatcgaatttatttaccaaaagaaacgatgcagcggtttgagattaccattcaacacctcagacaaaaaaaggtcactgaatcctttatccagctttgggagtttgaagctctgctagcagaaaaactgtacgatgaagccttgtccatgatgcctcagatcgatgaagactgccaggaagcgcttatggctgctttattgatctatcgcgaactattgacggtcattcgtgagaaaaattaccaggtttttctcaaaaaaaatgctgtctctatccaaagaaaagcttttttattacgttctgtaaaacagcagataaaaaccaaccggagtgaaaataatgcaagatgagattttagacgtggctgaacagttgttcatgcaacaagggtataaaggaacttcaacaagacaaatcgcggagttgttaggcattactcagcctaatttgtattatcatttcaaaagaaaagaagatatttattacggtgttcttgcgcggttagcgatagatgtatctgaaaacttatatcagatcgttaatgatcccaatgactccttagcagagaaactgcaacggatggctcgatttctgcaaaaacgtcaccctttcaatttctacttaatgatggatgatatcaaacataccgtctctgaagaaaccgccagaaaactctacttgatttggaaagaaaactatcagcaaccatttattcgcctttttcaaacaagtgaactacgattacgaaacgaactttcctaccagtttattgtcagccaaatgtttattctcattgcttcatacttagattcagcagagaaagaaactgaactctatcaggccattgatttatttttatatggtgttttagataaagagtctaactagacaaacgtatccactcattcctgattactaaataaggaggaagaatatgccagaatatactgacttgactgcgtctgctgctatcgtcaacgcctttatcacaaaatacaatcagctcaaatcaatttatccagaagcggtgattgagctttgtgacgaccaagggcatcaaatcactgaggtcaaaaaaatcaacagcgaattgatcgaattgatcatcgacgatagccaaggaccaaaatttcgttacatccatccttctcaatttgatttgacattcactgtcaaacaataatccattaggacgatgaaataagatactgctaatgcttctcgcaatgagaagtttcagacacaaaggcatactcaccgttgccttttgagttagctttgatcttatatcactgtcctttttttattgcaattctctttgatagacgaatcgtatctattgacgtaaactaacactgatttactattctgaaaggagcatgttatgtcaaagaaccgaatcgaggcctttacagatgcagtgattgctatcgtgatgactttgctggtcttagaacttcaccaaccaaaaaacgatacctttcaagcgtttctaggcatcgaacatcagtttatcatttatttgatcagttttgtgatgctggccatttattggaacaatcatcatcatctcttttaagttgcagaacatattgatggatggacattatgggccaatcatttgctgatactctcgttgtcgctttttccttttgttacttcatgggtcagtcaatacccgctgtccctcgctcctcaaatgctctatggtgctgtgattttcttgactgattttagctattatttgttaggacgggcattaagccgggaaagccaaaataatccaaccattaggaaactatttcaacgctatcagaaattaacctttactctttttgtcaacattgtggcattgctccttggctggttgattcatccgctttttgtgatcagtctcgatagtctcgttctacttctttgggtgattcctgagaagaaagccgaacgctacctgaatcaataatcaatgaaaacgactgcttgatatccccctcgacaatccattcacttgttgttcgtcttcttacctgtcgaataaaacaaaaatcatccaacaaagagcccttttgacggcagtcactgattcgccatcaaacgcactttgttggatgatttattattgtttacgcgtgctttgtatatcctagcgaataatactcaacgaaataaatctaccccaggattctttagcacttgctctacttgttcccgtgtaatcaagggaacatctcctaacatcgtatgggccaatacagcattggtgatagcaaaatccgcggttttttttagtggccatttctcggcatatcctaaaagaatacctgctgcatatgcatcccctgcaccgattcgatctagcacttgtaacaattgaggtgcagtttcaacagtttcttctttagtgtagatcatcacgctgataaactgtttgtcttcactggctatccgtctggttcctgtaaaccattcaatcccgtactgcgccataaaggcctgaacgatttgctgttcctctagtccatcaataggcagctgctcaccaaatcccaaaagaccgtgcaaatctcgtacagacccaaataccaaatcacaataaggcagaatcgcttcgtaacgttgttttaagatttctcgctgtccttcttccaaattcagactgggacgaaaattaaaatcgaaacaaactttgatgttcttcaaagtagcttgttttgccaatgttatcgcggtttgccacgtttcttcggtcaagctcaacgaaataccacaaatatgcaaaagatcgatcgtttctaaatattcagcgatgggataagttgcaggtccggaaaccccaaatgaactaccgcggcggttctgatacgtcacataggtggggcgagcgccaaaaccaacttcagcaaaataactgccgatatgattgtgtgcctgaccaataaattctgtcttgataccataagtttgcaaattcgctttggccgtatcacccaaacggttttttggtactttcgtcaataaggatgctgaaagattgaagtgcgccagatttcctaaaatatttacgcccgttcctgtaaaatccatccgcagcgaatgggtttgttctaatgtccgatattcaggcggtgtcaagcgcagcatgacttcaccgtatgcaccgattcgcatcacaattcctccttcactcttacttcaatgaatctttcatcatcttcagtaatcgtctcacatcttccggacgggtatcgcccgtctctgaatcaatgatcgagctatacacgtgaggaatgattttcttgactcctgcatccacagcaatctgcaagatttctgcaaagttatccaaatcaatcccaccggtcggttcaagataaaagtcatgagctgcacaagcttttgctaccgcttgatattcttctttgtgcgccaatcctttcatagggaaatatttgattgaactagcgcccatatccttgagtaatgcaatcgccgtttcaagaggaacctcagtgggttcttcctgtgaacttaacgggccagtggcaatattgacaaagccgactttgcctgtcggagaaactaatgcattaacaatagtttcttcttgtcctaacaacgcccgagatgttgcagctcccgtgaatacttgattgacatgttgcggctgcaacacagcagaaattcgagagaccatctcgctctgattcggatcaccggcaccgagaccaactgataacgcattttctatttctgcttggtattttttcatgtcttcaatcgctgcttcatccgtggaataatttttggaaagaacgcctaataagattttcccttcggctgcttcaaaacattctttggcgttttccactgagttagctaaaacgtttaaacaaattcgatcttctaaataagtcggggattttttcattcttttggttcctccggattcatgatttcttttaatcgattgacaatcacatgcatttcagtttctgtgactgcccgaatatcaaattcaataatgccgtgatttgcttgatattctctcgtgtagatggctggttcttctacttttaatttctggatcacttccatcgccgatggcccattttggacccgaacccgggcgcgataaatgtctcgccctgcaccatcttggacgatatctgcagacaagccaataatttgattgagcgctgcgatgaagggttccaaacgatgcttcatggaagcgccagactcgcttccttcagccagatactcttctactgcttgtgtaagccccatcatattttctttaccgatcttcatggaacgcccgatgcctttggattgcagtctcacccattctattagttctttacgaccgatcactaaaccagcacttggcccagacaaagccttggctccggagtaaatcactaaatcggccccctcctggatgtacctgaaaagatcctcttccgctgcggcatccacgatcaaagggatgcccgactgttttgcgacttgagctgtttcctttactgaaagcatacttttttgtactgtatgatgacttttgatatagagaatcgcagctgtctggggactgatcatctgagcaatatggtcaacagagcacatattggcatagcctgcctcaacaacttggcctccaccttgttgaaccatcacttcaacaggtgtgccataatccacattgtgtcccttcggcaagatgatctctcgacgctgaatcttttctgaataaggatggtaaagatggaatgatgagccttgtccaatgactgctgccacagattgagcaattccagcagaagctgaagagacgatttgagcatcttcaacttgaagtagtttggccaaataggcccctgttttgactgctaactcgctcatctcaaaaaaatgttccccaccaaagcgttgggctgttaagacaccttcgctcactttagaaacaccgagaatcgtcattttaccagaagcattgatgacttgcttcaagccaagtttagtcagattcaatgtcatatacttgtcctccaattatagtctttagcggaatgatctgtcgatcaatacttcgcttgttcccatttgaatcaatcagtactttggctgcttctttgaattcaaagatcgtgaaatcagcatccatttcttcttcgatggcaccttttccttttagttgaaactgatgagctggtgccaatgttactttctcgatgatttcttgccaactataaccgacaacggctaatttctccatagtagtagccaaatcatatactggacccttcatacggttacgtatataaatatcggtgctgatagaagcagctttcaaattggcggcataggctttttctgccaccgaaaaattgaaactatctgtaccatgaccaatatcaaaagcaacacctttgccataagcatcaaaaacaaacgatttgatggtatttgactgacgatctaaaataccattttccttgccattgaaacagtgggtcagaacgtcacctttctctaaacaagacaaaatgtcagctaaatctggtggtgctgaaccaatatgaaccatcaatggtaggcctgggtgttctttttggatatttttggctaatttcaatggagtgatgccattttcgccaatcaccgtcctgctcattctcgcttttaaccccgcgatgaagtcaggaaattcatttagggcctttgtgatcagatcccccttgatcttagaaagatcggctaattcatcttgttcgacgatgccccattttgaaatattgataagcgcaaagacattcgttttggctgcttgtgcaaattcgtagaaacgatggctattttcggcgccagtagtccccgcatcgattactgtcgttacaccttttgccacaccgatctgatcgggataatcatagtacaagctcatttcttcaaaacaatggacatgatcatcaatccagcctgccgaaagatactgatttggaagaagtgtccactccttttgtgcggattcttcgatcgtttttgcgatctggcaaattttcccttgctggataccgatatcgaaaatctcttcattgagtgtacgtgcctggcggataatcatatccaacatgttaatcattcctctcggtaaatttaaatttggtccacggatgaatatacgacaacaacagccgttcttcttcgacaattgatccaactttattttttcgcggatcgcaatgaggggtcaacaccacctgtaattcgtttttgtacttgccaaaatcatcgttgccgatcacaatatctccaggttggaattcctccagattatcgtgggctgggttatcaaattgcttgtatttttttcggacttctgttgatcgaatcatccgatcagtaatgtcccctcgacggtaatgctgctctttcagaacgatctttcgttcgcatgaagtgctctccggcgtaaaagtcaccgaaaattctgtttggtaacgattgattgcgccaagtgctgcaagttctgcttctgaggcataggcattcccaatgattacatcatcgatcaatcctgttgcaaaaagatgttttgctgcgatctctacaggtaaatgccgatgcatctctaatgtcggtaatccgtcattgatatcccatggaccgatcgttccagactgtgaagtgataaaagcggcagttcgaattcctttggctttaaaacgctggctgcatttttcgaagaactcatacggtaatgcggtgccttcctgaggataaaaattgtgacagccatataagaaaggcaagtttgcttgatacgtcaaaatattgtctaaataagcgacgtcgttgctcatatttagctcgatcgccaatccaaacggattataagtcagcattgcttctttgctgccgtcaaaacctaaatccaagcggatgccatccgcacccaattcgtggaaaaacgtcaaatcatcataagaaatttccagctcttcaaaaattgccggtgcaacatccaaaatcgtttcgtagccaagtgatttggcaaatcttaataattctgtgaatttcttgcgaacaatttctttcccttctgtcacttctaacatgctcataaaaattcgactaaatccatagcgttgagccaattctaaataagctttgtcttcgtcattactgctgtggtctggataaatagagattcctagttgtcttttcattttgtccactccttctgcgcaccaatttgagaaaattttgtgatcagcaacgtactgcaaccaacagtcagtgttgtcaagatcaccggggcaattgttgtcctgccaaatagcataacggcaatgactaatactaataaggattcggctatcagtgtgcggaagcgaatctgctggataaatgctccatgtctggttagccaaatttgtaatccgataaataataaacatgcatacatcagcatcattttatgcacttagtctcctttcgatcatcaaacgcggatcctcgcgcatgcaccactgtttaagcaacaaatgaaccctaattgcttcactcaaaagaaccatctagaaagcactctgggattgaggtgtttactgggatgaccccgtagaattgtttctgttcacctagaagaactcggtatttcccagagagctcatttggttgtcatttatggatcgttctttgctcctatcccatcgtctcgtttgacttcttgataaagagacccttcattcttgagtcgcttgtccttcttcacgttctaattgctgtttttcaaagactttaaagaatgggtaatagatcgccaatgtaatcaaaaagttcaccacaactaagattccagcggcaacactccaatttgtactcatccaagcagcaatgggtgctggaatggcaaatcctagacgggcagccatcattggaacgatccctgtcgtcgtagcaaagtacgaaattgtcgttgtaatcaaaggtgctacaagaaacggaatcccaagaatcggattcatcacaatcggagccccaaagatgaccggttcattgatattgaaaatacctggcaaaatcgaaagacgtcctaattgtttcaaatagtttgattttgagaataaaaacaagacaaccagcgcaagcgtcgttcctgccccaccaatccaaacaaaccattgcagaaattgttctgtaaagatgtttggtaattcatgcgcattgccggttgattgaaaaacttccatattttctgcaatcgagatatcccagaaaggacggatcaccggacccatgattgctggtccatgaattccaagaacccagaagaaacaaatcaagaaaactgtcaataagccgccaaacaaattgtttcctgctaaaacatctttcagcggcatcaaaaggttacttaagaagccattgatatcaaaaccgatgatatgacgaatgacccaaaacaaaacaagaatcgctcccccgggaatcaatgccatgaaggaattggtcacttcagggggtacaccatcaggcattttgatcgtgatatttttgacaataaagaagcgatagatttccactgacaaaatagctgtgacaattgcaccaaatagtgatccagaaccaaggttagcaacattgatgaaacgtccagcatcgatcacaccttctaccgattcaagaacccgaattggtggtgctgccgtgatcaaaaaggacattgttgccaaaatacctgctgtcaatgagtctagtttgtaactttttgccaatgaagatgcgataccaaaggtcgcataaagtgcaagcagaccaacagtatagcgaaacagaatgtctagaacttcacgatatggttcaataaatgctgcaactgactcaataggaaaattcaataatatcgtgaaaaaggaaccgacgatcgtcaatggtaatgtggcaatgattcctttacgtatggccaccatatgtcgctgcatacctaccttatttgccactggcattaacttttgttcaataaaccctacaaatccattcattttagcgctcctaattataacattataatctttacaaagacaatataacacagttaaaaaggtgtgtaaacgtttttttaataggaaataagctttcttcccacaaactgagcgatggaaaaaagcttatgtctttcattgtttgaatgttttttcgtagatatagtcatccattacaaaaccttgaccgatatcaacctttcgttccccgacccggacaaaaccccggtgttcgtagatggcaatcgcttgttgattgcctttattgacgttcaaaaagagtgttttgccagcggctaaagattcaacccaatcaaatactttgctggagacgccttttcctcgcatagcaggtgttaaataaagtttactcaaatacagacggtctgcctcttcttcgtaagctgtgtagccaataatctcatcttctaatcgaagaataaaataagcggcgccttctttgatttcttgttggatcgtttctggagattgataagtttctagcatatagctgacttgagcagacccgatgataggtgtaaagacttctgaccaaatctccttaacgacaagctctaattcttgaatctcctctaaagatcggactggttgaaatgtaattttcatggtggactcctttcaaagatgtatccctacatatctttattatatcggaatgttttttaaataaatagaaaagtctttctttgtcttaactattgataatgttgtctatccgcaattgaaagaaagatttagcaccatcagaaagttctgctgatcgcatcaagtttgttaggaaaaattagatgcgatgacgagaaacaggaccagctcattttctggaacagtttctctttctttcaatttttatccgaaagtgctaccccacattttttcgataagtttttttcattccccaaaaaaatccgagtgtgctatactggttacaagaaaatagagactgccaccgggtagttaaaagaggacgatcattccagtaggtcttagaaggaatggtcttcctctttttgttttctaaataatcaaaaaggagggaaatagaatggcttggctcgaactatttttagctggcgtactggaagtattctggtccacaacgatgaaatggagtgaaggatttacaaaaatcaattttacgatttacaccattattggtatgatcgccagttttttctttttgtcgcaagcaatcaaacaactgccaatgagtttctcctaccctatctggactgggatcggtgcggtgggttcagtcatcattggtgtggtattgttccatgacaagataaacccagccacttggctttttgttggattattattgatcagtattgtaggcattaaaatgactagcggtcactaacctcaaaaaagtttttttgaagtcttttaaaagacttttataaaaatcgaatcacttctttctaccgaaatctttcttatttctacttttgctttcctctaggatatcatcagactactgatcttctcttacaaaagaaaagttggattaccttcattctttcttttctcaaaggctaaaaaagcagcagtttgatcattgatggatcaaactgctgcttttctttttgtacttgactaaaacgagttgaatctcaaacgagttcagcttttttttctgtaatttgtttctgaagaagagctagtatctgtctatcttctactgataaaatataatttttacaaatttctaaaaggacaggttgtcccacttcattaattttctttgcttgaaggtcagtgatatttatcgtctccatacgatccctactttctttttctgataagaatagtttgccattctttcaataaaaaaagaagcaacgggatgtttacatgctagaaacgtggtgtttacactgttttttttaacttacacaacacaaaatgacccttaaaaataaatcggcgattaatctggttcaatatgaatatctgtatcatagacattgaaacgatcagacagcaatgcttctatggcatcagctactgcatgacttttttcaactgtcaaatatttgtccatcgtaataacaatatcaagaaacacatttgcgccatacattctgccgcgaatactcttgacagattttacttccggaaaatcggctacgacttgttcgtactcgttgaccaatgtttgatcaaaaccatctgacaatgagaaggcactttctttgaaaatatcaatggccgtttttaggatcagaacagcgacaacgatcgctgttagactatcaagccacccccagccaaaagaagcggcaaaaatggcaatggcggttccgatgctggtccaagcatcgctgcgattgtctttggcagcagcaagcagtgcggaactttttacttgtgcagccaatcttcgattaaaggtatacacaccatacatgagaatagccgagaccacacctataattgccgcaagcatatcaggactttctgtctccccttggatcaaggaccagacagaggaataaagtacttgcagccctacagcaagcatgatcaatgacgtaatcaaacttgctacattctctgctttccaatgtccatacttatgttcttcatcagccggtttttgagctaagcgtagacctatcaaaacagccactgaagcgattatatcggtggcattatttaaaccatctgcccataaagcttccgacccagctattttaccgatcaataatttaacgaatgaaatcaatagataggcgatgatactaagcagagcgcccttttctgctcgcttcaattcttcatatctagtctctctcatttatttccctccagcatcaagataacaacttgaaaataataactgaattcctgaaactttgcagtaattattggagagatataatcttttaggaataacaaacatttgctttctgcgccacgaatgcatcttgcaggtcaaactgaatgaaaaaaaaattcagaaggcaccttgttgatttcctttagacatgttaaacaagctttaaatcattcattgttccccccgtttaatgaaaaccattgtcactgaatgggagacactatggggtgtccttgctgctttgcgtagttctcttctatagttctcttctatagttctcttatatagttctcttctatagtttccttctaaagaaataagagggaaaaatacgggggaaaatgtgaaaattttctattttggcaaagttttctgttccatttcgaagtgatctcctaagatatggctagaaatgaatctaaagagcagcatctgtctgatttcttaatataataagatagcagttttctaagacaaaaatgaataaacgatgattatttctagtgaaaaatcaccatttgattttatcaatcgcgggcttcaaggtatactcaaagaaagtaggtgaaaaaatggaatctgaaaagtgttatgccaaaatgcaagatggctcggtcctttactacgagaaaattggaaaaggcaagccattattcttattgcatggcaatggcgggagcagtgcttactttgctaatcagatagctgaattaagtcagaaacatcagctgtacttgatagacagccgtgggcatggcaaatcaacgaatacccgcaaaaaaattgattttttcttgatggctgatgacttgtatgccattattcaaaaagaacacctgtcaaaggtagctcttctaggctttagtgatggcgcaaatttagctatggtgttttgttttaaatatccggaattagtgagttgtctgattttaaattccggcaatacggatcctaaaggggttcggctgtttgcacggatcggcagtctgatccaatatgcagtcgtttggctttgcgcgcctttcgataaaggcatgcgtggttttttaccgattcttgcactactctttcgtaacatcggtttatcagccaccgatttaaaaaaaattactgtcccaacactgattttggtaggaaaaagagattcaatcaaattgtctcattcattttatctagccaatcatattccgaatgccaatttcatggtagtaaagggacaaggacatagttttgctcgcaaaaatccaaatatattcaatcagaaagttctttctttcttagataaggtgggacaataaaatgaaactttttacatggattcgtaaccatctctccttgttcaaaggactctttttgatcgctgtagcagtgatcgttttaggtgaattgctttccttaagcaagacgatttccgtcgatcaattgacgacactgttttccgaattagcggtttggcgtgttgcattgatgcttttgattagtttgctttgtattgcgccaatgattggttatgacattatcttaaatcggctcttaggacaaaagctttctgcccgttatttaagtgaaacaagctggatcatcaataccatgaataatcttgtaggattcggcggttttatcagcattggtcttcgctccgaattctatggcaaagaaaaaaatggcaaagatgttgctcaagcaatttcgaaaatttttatttatctgatgtctgggttatcgcttttatcattactggcattagggttcgtcgtctttgggccaacaactgattatctgcagcaatattggatttggctattgggaggaagtttgtactttccagtggtctatgtcttaagtttgtcgaagaagaatggctatttaggcggtctgaccccttctgaccgcggtcaactgattttggtttcattattggaatgggtaggggtatttacggcctttatcaccaccggtatgctgatggggatctctgtggatatttttcaaatactgccattatttattgctgcatctgtgatagggatcgtatcaatgattcccggagaattaggaacctttgatgtcatgatgatcatgggaatgggttcattgaatattccccgagaaagcgtcgtagcgtggcttctgctattccggctattctattacatcattccgtttttgattggggtgcttttgttctctaaaaatgtcagtgtaacgctcaacacacgcttttctggtattcctaaaggattgcttttagaagtattccataagattgaagtactgttgctctatttgactggtacgatgctggttttgtcagcaacgattccggaagcatttgaccacattcaatggttagcccatcttaatccgatacggttgaattttgtcatgcaatacccaagtattttcttaggctatcttttcatcattgctggtcgtggggtttcagctcgtgtttcgcgcgcttattttccaacattgctgttgattgcagcaacgatcggctatgcggtcttagccggtttccgcttttcaaccatgtgtttcttgctcttcttattggcgattatggtcctttccaaaagtgaactatttcgtaagcaactggtttattcttgggaatggctgacgatcgatggccttttgatgggatctttgactgtcctttatgtgattattggggtctataacatgccccatttaaatcgtcatcccgcccatcgttccattgattttcttttgtttccttctgaaaagttatggttgcaaggctttctggctatcatgatcgtcgctatcgcggtcttgcttttctcacgctatttaatgggacccaaacatcaaattggacagagacctgagaatgaaaaaatcttgactcttttagagacctacggtggtactagtgatagccatcttgtctttttgaaagataaagaagtctatttctatccgaacgagaccgatcctaccgtctttttccagtttacgacctataacaataaatgtttggtcatgggggacccagctggtaagcaagaggattttgctgctgcactagaagcctttatcacagaaatggatcagtggaattatttgcctgtcttctatgaaagcagtgaagaaatggtcatgctgcttcatgaattcggctatgacttcatcaaatttggtgagaaagccttcgtggacctacagaatttcaccttgtctggcaaaaaaatgaagggtcaacgggcattaaacaacaaaatcaataaagaaggctttactttcgatgtcctacaaccaccgtacaatgcggaaacatttgccaagctacgagatatttctgatcgctggctagatggtcgcaaagagaaaggtttctcattaggatttttctctgaagattacttgagcaccgtcccaatcgctgtcgtcaagaaccaacagcaagaaattgtggcatttgcttcttttatgcctacttatcagacaggttgtgggtcaatcgacttaatgcgtcatgatcctgaaaaagcacctaatggcacaatggactttttgttcatcaatctcttcgattattttaaaaaccaaggattcgaacagttcgacttagggatggccccgctggcgaatgtagggacgttcagaagcagtttcattcaagaacggatcgcctatttgatctataactttggttctcacttttattcctttgagggattgcgggagtacaagagcaagtatgcagcttattggtctcctcgttatattctctattccagagatagttggatcggttatgtgatgatcgcattgttgatagtagacaatcgaactattactacgtcttctctttaggataaaaaaagactgcgccacaagtaccaataagacaacaactatccagtaatcaaactattgttcaacaaatcaaaaacgagctccacccatgtttatcaaacaatgggtgaagctcatttatgttggttgattcagttagtttgttattcgctggttttgtctgtttgttcccagagttgtttcacaactggaatattgcctaattctgtcatgtttgatggtagaatgactgtattcgtcttactgttgacaatatctttaaaggcttcaatgcccaagtaagagagtgaacgttcgtctaattgactttctttgattgcttcattgatggctaagatccgtttacgttctgcttcagtaattttagcaattcgttctgcttcggcgtctgcatcgatccgtacacgtttagcacgagcttccgcatcaatctgagtttgttccgctcgggcttgggcatcgatcgtcatttgagaagctttggcttccgcacttaagacagcagaagatttctccccttgtgcccgcgtgatcatggattctttatcccgtgaagcagtgatcagtttgttcattgattcaatgatttcttgcgaaactttgatctcaccaatattgattcggtcgatcgccaacccataccccgctgtgatatctttaatggaagtaaacaacgccacgttgatttcttctgttccgttgagaacttcatttagatccattttcccaatgattcctcgcaaattggattgcgcatcttggatcatagaaacgaccgagttttcattatcataaacaaacgcccggacatctgtgacatggtatttgatggcttcatcaatttgaacgataacattatccttcgtgatagcactttgcggttcaatttctaaaggaatctgtttaagtgatactcgttctctgactgtatataaaatagggactaaaaagtgtagacctggttcaagtgtcttaacatacttcccaaaactctcaactacttttacttcaccttgtcgaacgataacagcagtgcttgccaacagccaaatcgcgatcgctatgacaagaacgattaagataatttgtacgatgatcattgaatataccctcttccattttcaaataatgtattgttcacttgtgtcagcaagatcccattttcaacgccgatgatctccagcatcacattctctgctggaataccggcaacaacccgatattcagtatacgtaccaaagattcgaatgaatccggcataatgatctgtcgcggaacgaaaatatttcccgactgcgcggttttccatatattctacgattttagtcaccctcttcactaaccaactatccttagattctgtgctatcatcatatcatgttttgccttgctacacagtaattatttaaacttttactttcaatttaatgtaaaaacaagtaaaaatataaaaacctgcttttgcaagcaacttaattgctttccacaattaaattgcgtacaatctaattgtacaaaatcaaaaaacaggagtgaagttagatgaaaaaaatgtattctacaaagatgatcaacacaggtggccgttcaggagaagttcatagtcctgatcattccttcgaattatccatcgcagcacctggtaaacgggtcgaaaataccactaacccagaacaactttttgccgctggttttagtgcttgtttcaacagtgctcttgaacttgtaaagcaaagtaaaggaattgatggcgcatcaaccgtaagtgcacaagtttcactttatgccgaaaatgaaagtagttttgttttaggagtagagattgagggatttgtagaaggtctttcattagatgaaacacaagaattactagaaattgctcataccgtatgtccttattcaaaagcaacagccggcaatattgaagtaaccgtcaaagctgttagtgagtagactttccgatacaaaaaagctatgataagaagcgtcagtataaaaaggagtgaggacatgaatgacttagcacttgaaaaccaactatgttttcctctatacgccgcttcgaaagaaattatcaagcattataaaggattactggaccctctggacttgacctatacgcaatatctcgtgatgctcgtcttatgggagcaaggaacattgacagtaaaagaattgggcgattccctgtgtctggactctggaactttgactccggttttaaagaaactcgaaatgaaaggctatctttcaagaactcgcaatcaagaggacgaacgttctttaaatgtgtcattgacaggaaaagggcagctgctccatgattctgcggtgaatattcccagtaaagtcaaagacttcctgccattgtctcctacagaactagctgatttacatcgcttgacgacaaaaatgctgcatcagtttcataaaactagctaaaaaagatccgacttaccggattgctcgaaacgttagccgaaaaactaacttcttaagcgcagtccataagtcagatctttttttgttggctctctttggacaagcaagatcactgatggtcttttggcattgaaagctcttgttttttggcagtaattttgtccattaacatcgctaactgcttttcttcgagacgaccaatcgccacctgaagcatagcaaaaatctgatcttgattaagaatcgactgcagtacttctaattcagtcactttgggttgaaaacgacgtgctaaaaccgaaccgctcattttgatgctcgcaacttccagtatgcctttattgactaattttctgatgactgataacgaagtgttgcgattcaagttaaaacgctcactaaaatcactgcaacatagtggttcctgagcattccaaaaacaaatcagaatctcccactctttttttgaaaaattcaaataatccatatatgcccctttctctttgctcattccatgaacaatgttatatagctaatttcctgaatccagtctaactgtaacgctgaattgaaaagacttttcagttattcttcattcatatatcaataataatctatatttaccattttttcaaaatatttttaatattattgaataaataaagcgtaaatttaaacaaataaacagccgaccactgatgctggtcggctgctccttgggattttaggaaatcatttatttgatattgaagataaggctttcatgttcctgatctttcaaagaataaccgcaagattctttatttaaatgagtataatcggtttcgatcatttggatgatttcttcttctgtcaagaattcatctcttactagaatcaatgagttcaataaaacaaaccgtgaatcatacccaagtatttctggaaaaagttcccaaaaatttgaaccatctatttgttggacagcacatttgaaagaatcaatcaattggtggatgtaagtatataccttagggtactctacttccacaaggtcaagcacctctttatcgatcactttctccaaatagtcggctgtttctttatagagcattaaatcaatcacgcgaattatcaatcctttcatgcggacagttcacagtcaatctactgaaacttcctacgtatatatatatcataaaatcggctaaaattattctcattttgagggaataacgaagaaaaaaatgagaataacatcacaaagtatgagtgaagctgaattatactcaacaaaacaatgattttagctaagaaaaattcgttatatataacggtagtattattaaaaaaaaggaggatttttacggacctgctttaagaatcaaaaaggcccgtaacttataaggcaaacatagccagataatctaagtgtcttgcatctgctatcacaaaaatcacagttatcaggtttgtttgctcttagtcacggacctgcacctattaatgtgcctgatgattgactgaaagagatgatgctgtgctagtagaatgatcattcttagcacgaagtgcagatagaatggatactgtatcgatcacttcttgtaacaaagcgccaaacaacgctgggatcacacccgtgctggcaatcaacattaaaacgatacaaatgaagattcctagcaacacggattggcgggcgattctcatcgtgtcttgagaaatctgtacggcttgagagaccttgctgagatcatcttgtagtattaccgcatctgctgcttccgttgcagcactagtaccatgggctcccatagcaatgcctatatcagctgctgctaaagctggggcatcattgaccccatcccccaccatgatgatcgggcgttcagctggttctgtttcttttataacggcaattttttttgccggcaagcagtctgctagaacggtttcgatccctgcttcagctgcgatcttccgagcaacgaatgcttggtcacctgtcaacatgatcgtctttttcaatccttgatgacgcaactgctcaaccgtttgtttggcttccttacgtaatgtatcttcaaaaaagatcgttcctatccattggtcatctttcccaacacaaacattggttttagcttcatctacaccaactgctccaacaaattcaggtttaccgattttgatcttgtgtccagcaactgttgcttcgatcccttgccctaccacttctttcaagttggtgactggcagcaaagtcagctttcgttccatagcagaagcaaccagagagcgggcgagaatatgagtggaatcctgctcagcactagccgcaatgcgcaaaagctcttcgaccgatagttgatcagcagtcacagttattttttcaacgtgcaactttccctctgtcaatgtgcctgttttgtcaaaagcgatcgtttttgctttggctaatttttcgatcgtggtgccgtttttcatgacaatcccattgcggcttgagcgactcatgcctgctactaaagctactggtgctgccaagattaatggacaaggtgacgccactactaggacttccgcaaagcggacaggatcttttgatacaaaccaagcaatccccgcaatcacataggctgccaacgtaaatggtacggcatactgatccgctaaacgaacaaagcgcgcaggttttgcttcagattctttgactaaacgaacaagaatttgatattggctatctgctgcttttttcgtcacttcaaaagtaatcgcagtttccccattgactgagccagacatcaattcatcaccaggatttttctctacaggtcgtgactcaccagtcaaggatgattcatcgacaagggtatttccttcagtgacacagccgtctacgggaacgatttctcccgggcggacgatgaccagatcaccaatagctagttcttcaaccggaacatcttttttatcattcagccgatgggcggtctgtggagaacgttgcaacagttgccgaagttctcggctggcttgtttgctggcgtattcttccaaactatcgccgcctgtcagcatgatcaaaaccatcaaactggcccaatattcgccaacagcaagtgtagcaacaatggctgtgatcgctaacagatccacgccatattttcctgaacgcaatgtttggatcatgtcgatcaacatcgtcaacgctgtcaatccgccgatgatcgcgatcaaaccaaaagcaatgggaggtcgatcaaagccaaattcagcgatcaacgccgcagctcctacgccgatggcaatcaaaaatttacttaaacgattcattttatgcacctcacctttcaccaaaagcgtaccacttgcaggaatgaaatgaaacaaaaaaccgttaaatgagaaagagaatcgttaacgtagcaggctttcaagccgttttcaaagttcatccgcctcattgtagataaacctactgctggtgttttaaggtagcacgtcaaatctcccgaatcattcatacccaagaaaatagcctatccgcgttcactgattgctttgcgaggagaacagcgttatctcggacataaacccgttgtccatgtataattgatagtaagagattgatgaaacatcgataaaattgtaaaggagacggatcaaatgaaaaaacactgtaggtgcggaaaaaaactagatggtgctgaaacgaaatgtgctgcttgcaaacaaagcaaaaaacaaaaaatcgagtcacttgagaaatttgtcaagtatggcagttttgccttggccgccctttctttagtactaaaagtagtcaaagatcgggaaagctgagttcttatccttagacagacaaaaaaacgccgaaatggcgtttttttgtctgtctttctgaccaacgtgcattagtctgtgatcgtgctgtctaactgccaattgacttttccttgataggttcctggggaaagggtctctatcttaggggcaaaccgtaaataacaatcatactgacttaaatcgagagagctttatcgctaggcgtctgctcaaaaagtacttttttatctgaagtaatggtgcaaaacaatgaattatcagtagaatcgtatagaactagttggacttcatcagccaatgaggcgccactattcataaatggggtggtttgtcccgataatttccatgtaccttcactcgtattgctgattgcgagaggcttgctggttgttgcaattggaacttttattgatatcaagccattagaatccattgctcgagccaactcgttgattgtgactgttgttcctttgaaagattctgggactgattttaattcgacgattcctcgaaaatcaatggcaaagtaatggattgctgatgaattgccttctgtgtcgacgacatatgttgcaaaataataggtagtccctggggaaagatcactcgtctctgactctaaagtgtagtggaagggatctgacaaatctgttcgttcaagaactgtttttagagtaaagtcttcttcctgtaattccttctcttgtgaaaataaatcacttataaataattgcgcctgcgtagaattactatcttccacagagatgtcagtataggcatttcgattttgtcgaaggatcggcgcagttttctgcgcttctgacattgtggcttgtccgctggtcaatgttggtgggaatttgccttttaccgtataaaaatgggtagcggctcctcctgaagtaaaactggatataaaagcatttccactaaaggtagtctcaactggtactacttcatcaatattcgcatctataggggtcccactatacttgaccctaaaatgaacaatataggcattccctttttccaatttcggcaatactacacttatttgtcctgtctctcttatatattcgattggggaccccccatcaggaaaaccgttgatcatggtatcttctggtttaccaaaatagacagtatctttcacagatacattatctggaagtgtgagtttgagtttaatccctggattcaaacttgatagatcgcttgtttgtttaaaatcaatataggttgcataagtaatctctttacttgcatccacttcaattggtttatccattactgttcccgtgtccagcataaactgatctggctctctttggaagacgcccgtccgcatatcaatttcgactagaccttgaacatcgacgaaagcgactgctttgttttgggcaaatccgccattggcaccggtaaaaccaaaataaactggcgccgaatttgttaaattaagattgtttttaaaagtatcatcgacaggaatcgatacatctacattaaaatctggaacagcataatgaaattgttgcgtagattcattgtaatccacgataaaggtatgccaatttccatcggaaatgtccgtaacgccaaccgtgttatagtgatttaagactttatccaccatcagccagccgtctgtcgtataagaagcatcggaaccagggtaagaccaagcaatatggtgtccctttgttgtcacatcacgatccatcatccgatcagtagcaaggataccgccattattgttgtaatatgtatcaaattcaattgcgatactatttgcgattgcaccttgactaagtggggctgatccagaaatattcgaccaaactccaattgttgatccagcttctgaagctagtgcttgaggcccgctactttgcaacacaaaagccagtccgtcgctatcattagccgtattctcaatatagaaagccatttccaaatggaaatctcgtgtgaaagaagtcggattgttgaaccaaactgccccgctagaatttatggttgtgtcattgatttgaacgtagttatgcccttctacaccttgcaatgaacctgctttacctgcagtagagatcattacttgattaattggtaaagtagcaaagtccggcgcagtgaccgccgcaaagactgtttgctgtccttgcaacagccaaaaagttcctataaaaagaagcgataaacaaaaagattttagcatttttttcattcttctcactcactttcatcggagtttttacgccgcttcactaacaagaaaaggatgattgcaatcaatagaatgattatagcaatcaatagatagaacagaaaatttctttgagcgatagccgctgcatatatcgtagttcggttgacagcttttgctgcttgacgatcgataacgaccttatcatcaaaaacccatgtgcctcgctgagaggataattcgatgcgaatcgtataagtgcccggtttgagttcttcttgttcaaattcactatagagatctaagacagagttttgtgcgaattgaaaattttctgacttaaagccaccgacgatagcttgattcttgtcacgtatcgtcgtattcacggaaatattcccaaatgcgacgggacgaatattactgatactgctttttaaagttggcttgccatttttttcgactgctttagtttcaactagttttaaatctggctttggcagctcttgtagactttgacgcattcgtacccctaactgcaactgatagtttgattccaaacttgcatcagcttcgtgagcagtttcctgaggtttgacttcttcgaacaaaaaagcccctaagatttctccgtcaaacactgtttcctttaaatcaagtgtaaaaatcacctttcgttcctcaccagattttaggcgtacttcttgaatggggtttgaaacaaagctagtaaaagacttacctccatagtcttcggccgttttctttcgttgataactgatgattccagtggaagcagaataactattcagtgcatcagcggtgatcgttatctcttcggaactcgtattgtgtacggcgataatcaattcctgaacagtctctttatttaccagcaaatcgaaataagttgcttcacttgcttgattttggggaagttctggtataacagtaaatctggtggtctcagcataaccacgagtcacaggaaaataaacaaagctgataaataaaaagatccatactgcattctgaagaagtcttctcattgtcatccatcctattactgtgcttgataagaattagataatgtccacgtaatcgttcctgtatagtcaccactataaacattttgttggggaacggtcaacgttgtggtcgaaaaatcaaaggtattgattgctaacccagttgcgccatctgcggttgctactgaagtaggatcggtagctccagcaaccaattcagcatttgctgataaagctgcatctcctgctgtttcggtaccttttagtgtaatctttgcatttgctaattctttttgatctcattcgagatttttgataattttgctgttaattgccaaccaactgtgtttggaccacgaaaatcagaaacagatgacgtttcatttgataccgtggtgatcactttctcttgttgagcgaaatctgcgatattcccagtaccaaaatcaaaatttgaaacactatcaagggacaaaatccctggattgatggttagtgatgcttcactggtcattgaagtagatggatttgcttccgcagctaaaccagtcactgggacccctaaactacttattcctaaaatacctaatgccaacaccatttttttcataagtcattccttcttttttgtttattaaacaagatgccaattttctggcaatactttcattttttcaaccacaaaaaaatgattgtttcttcatcgcctcacattgacttctcatttgtacttagtataatcaaaagtaccaaaaaaacggatcacaaaaccttacaaataggcttcatattgtgcgtaaaaatggagcaaaaaaggagaatactgatgtaccgaaagttcatttctcccgcagaggaaaaaaagcttgatatattcaaagcagtatgtaacaccaatggaatcagcttattaaaattatcaagagtattgaaaatccccatcaaaagcttgcaaaaacatatctactttttgaatgaagacttgaaatatctgtccgtcaacctttgtctcgccaaaaattcctacaaccaatattgtatcgaaagaaatggagatagtgccgaaccttcttattcacagctggtctatcattacttgctcagttctccacaatatcaactggttcagtaccttattgggcatacagattcttcaatgtcccagttatgttcggatcttcacgttagccaatctcacatgtatcgtctgataaaaaaagtcagtctaatattaaagaaatttcacctctcaatctattccaatgaagaaaatattgtcgaacttgctggaagagagttggatatccgcatctttatttatagttttcttacgcaaagtgcaccaaccgagtttcagcttttatctgatcaatatataacagaattcgagcaattcaacagcttttttgatgctactctcttagatcagttgactaaaaataaattgtttgccttttggaaaacaattaccatccgactttctcaaaagaaatatttgcctgaaatcgagaaaaaagctcaagcactcttgaacttttactcctttttgccgatggaagttctcgattcgttctttttctccaaaactaatttagataaacggatcgctcaagccgaatacttgtatttaaatttctttttgcatattttccttcctgcagttgttgatcgccaaaagattcaagagagtattgcgctggtttaccaatcaaaaaagcctctcgttcatttttttattgatatgatcgaagattggcgacaaaaatttgtgccgactatgaagcaagactcatttgaccaacttctaaacagttgtctcttattttttaatctatcgatttttatcgatgttgatttgctgaaagtttggaatttagactataacttgcccgatgaaagttcgattgacaacaatagtcaaacttatacagcaattgctcacttgttaacagaacatgtcaatacctttccaaacaatgatttagacaaagaattctttcaccgtaaacaattgcgttatcttgcccaactactctatctggaaaccaccatgcatgaaagtccaactattcgggtttacattcgaacaacgattcaatatcgaaccaaaatgctgatagaagcccgtatccgatctatctactcagagaagtcggtctcattcactaaagatatcgaaggggcggacttgattattaccgacaattacgaagaagtagcgataacggaaaagcttctgctactctcagatatacttaatatgtatgaatgggaatctttgtttgcaaaaatcaatcaagtaattaccaaaaaaatgtttgccctcacttgcaaatcctcttgttgaaacaaattttttatcatgattccataaaaaaagcgaagctgaaatatcagatgggttccttgctaaagcaatgcaaggcctctgtatttcttacttcgcattttttattgtcgtaagcgttttttaacaacgggttttaagcaaagaagcttccgcctgttacactatagacttgtcctgtgacatagctggcttcatctgacgctaagaaaacataaactggcgctaattcaacgggttggccagcccgttttaataattctttttgtccaaactcagggatcgctgattgtggttgtcctcctgaaatttgtagtggtgtccagattggtcctggtgctacagtattcacgcgaataccttttgaactcaattgtgctgccaatcctttactaaatgaagtgatcgctcctttggttgctgcatagtctaacagatgagcactaggttctgcactttggatggaagtagtggtaatgatactgccgccagccggtaaataatccagggcttcttgaactgtccaatacatggagatgatattcgttgtaaatgtgtccgtgatttgttgggtggtcaaatctttaatatctttgaccgcttgttgcatacctgcattcaagaccaaaatatctaaaccatccaacgctttcgctgcatcatgaaccaactgacgcgcaaaagattcgtctttcaaatcgccaggaatcaatacagctttttgacctgcttcttcgatgatagtcttcacttcttgggcatcttcttcttcaaaaggcaagtagttgatagccacatccgcgccttctttagcaaaggcaatggctgctgcacgaccgatgcctgaatccccgcctgtgactaatgctttgcggcctgataatcgtcctgaaccattgtagctagtttcaccacaatctggtactggctgcatttttccttggaccgctggtgcttcctgttcctgcttttcaaatgtgccgttatagtacttcgttaatggatcattgattttttttgacatgttcatttcctccttatttttttcatgctcgtcatgtagaaccatgaccttacttaaaagtgtagaggaatgttcatgaaatgaaaaacgaaacgctcacttcatggaaaaatgcgttttttttgcaatttttgaaaaaaaggaccacgaatccttaaggattcgtggtcctttgatttattttgcggttattgttaatagcgcgtcacggagagcctcataatcagatgctgtttgtaggaacagatctggctgactttggtgactatctaccgtatttgacgactgagtacagttcctttttactcttctttttgtgcggcttatgcgggttgctctttttaaccggttatttattgaatcaccgttctttccaaggattggctcatctattcgatgtttccggtaaactggtgacagacttcgtcacgatttttgcattaggggtcacactgatgaacatggcgatcatggggatgctgctgcttgtattcatctacttgcttgggggccagctatcaggcccattacttggtgctgttctgacagtggttggctttagtgctttcggaaatcactggaaaaatagtctgccgattttgattggggtcgttcttgccacacgtttaggctttaccactgagacttcgacctttcaattgctgttgactgcgatttttggaacaagtttagcaccaatcagcggctactatggaccaattgcaggaatctttgccggtattgcccatgcggcgttagtaagcaatattacctacttacatggcgggttgaatctttataataatggtttttccagtggctttgtggcggcagctatggtacctttgttagatgagatcaaccaaatcaaaaggcggatgaaccaatgatagaaaaggaacaagcacggcggatcgtggatgaagtggtcacctactttctttcccacgactgccctcatatcactactgagatgtctttcgaaaaaacaggatttcgagccattattgctgggacctgtccagaagagcccagtgatttagccgtatttgcggaaatgttgaataccccacgagacattgcgctagaaagttattatattgaacttttaggcgggcaccagtcgattcatgaagaaaaagacttttatttattaggattgttgatcgatgaagcaacaatcagttacgaaaaggatcgcttgatcattacattgtttcgaaaaaaatattgaaggccatgggatctctttgatgaaggaggtcccatggtttttcgtttacaacggtctcttgatacacggaatgcgttgaaaaggtgaacctttggttaacagctcccaatacaaaggagggcatcatgaaattgttttcatgacaaaaatgaaagtttattgataggtttttcacactacaattgtttttacgcccgctataatcctctttagactttacaaattaaaggaagtgagaatagatgaagaaattttggatcggcctgggtatcctaatgatcgttttgtttgccgggttacaaattgctgagaaagtcatcatgggcggccaaagttactatgttcagatcacgaccgatggcgaaaagatcgaaaccgaagacgatcgaggcaatcaagtgatcgaatataaatatgaactacctggttacgacaaagacgcaaagaagaaaaatctggaattcttagggatgaaagatcgtcctttgaaaaaagacgcttacttaaaaattacctggaatcaaaacaagggcgtgacttcctatgaagaagtgcaaaagaatgctattcctgaaaaagcgttgaaacaattagaaagtgaacggtgataaacaaatggcaaaaattattgaagcaaacgaattaacgaaagtttacggcaaaaataatgagaaaaaaaccgaagccctaaaagggatcagctttgtgattgataaaggcgagtttattggtattatgggtgcttccggttctggtaaatcaacgttgttgaatattttatccacattggaccatccatcttccggaaacatccgcatcaacgaaaaagatatcacaaaattacgcggtgatgcattggcagattttcgcagtagagaaatcggctttatcttccaagatttcaatctactagaaaatctaacggcttctgaaaacattgctgtgcctctctctttacaaggcgtacggccgaaaaagatcaaacagctcattcaacaagtcgcgaatcgcttatccatcagccaaattttggataaatatccttccgagatctctggtggtcaaaagcaacgggtagccgctgcgcgagcattaatcaccgaaccaacgatcttgtttggggatgagccaacgggtgccttggattcaaaaagtgccaaggatttattagacatgatggatgatttaaacaaaaatgaccaagtatcgatcttactcgtaacacatgatcccctttcggcaagttattgcaagcgaatcttatttatcaaagatggtaagatccatcaagaaatcaaacgaaataatcaaacccaagaagacttttatcgtcagatcttagtcatcttaggaaatctggaacagtaggaggataatggtatgctttggaaattatcacttactggtatcaaaggccgcttaaaagactacatcgtcttgttttctggtctggttatggcttctgccatcttttatatgtttcaatcaatggctagtaatgaagaattcttgaaaaacaattcaacgattggtgtcgttgtcattatctttcactttggaacggtcttactaggaatcatcacatttgcctacattctctatgccaattctttcttaatgtcgatgcggcagaaggattatgccatgtttatgatgttaggagcaaaaggacgaaaaatcgcccaaatgatcttcatcgaaacattttttgtagggattattgcaaccattgctggtgctttagcaggtatcggattgacgaaaattgtcaatgatcttttagtacaacagttaaatataaagattactcatttttcgccattcaatgtaaaagcacttgtgatcacactggtcttttttgccattctcttcctgatcgcagcaatcgtcaatgcttcagccattgccaaaaaagccatcttggatttgttgagagaaactagtacacctgcacaaatcaagcaaaaattcccattcttattggttcaaacccttttggggatcatctttcttggaatcggttattatgttatgagcgatctaatgaaatttcaaattatgggtattgcgattgccctagtcacgatcgttttgggaacctatctagttttccgctctgtgatcgtattgattttgacattattaaagaaatcagatgccatcgcactgaaaaaattgaataatttcactttgtctcagttaaacttccgtatccgtgactatacgcagatgctttcgttagtatccatgctgttcgcattagcactgggcgcattaaccgttggccttggtttcagaaatgaaatccctaaaatgaccaaagcgatgacctcttatgacttggttctgaataatgcccaaactgtcgaccaacaaaaaattgcggatttacacccaacattgaatgtcagctatcgccaaaaagaggatgacacagccgtttattacattcaagaagaatttgacaaagatcctttgatcgttacagaacagggagatcttagtcagagagatggttaccgctcactaaatggccaagcgatcgcagctgatcttgcagaacaggaccagctgcgcagctttgaattgccagaacagcgagggaaagaagtcaagctgctttctgccaatgcctttgaacaagtgaacgcacccgaaacgatcttacaagtcattcaagtcaaagactttgaagctgtcctgccaaaattaacagcacttgctaagctggatcaaaaaaacaatccatccttagcaggagaaagtaatcttatgcaacgagcggatgcttatgacacattcaacggcattttctcaggatttgaattcatgggcttcttcttaggaattgcctttctaacaatgttagctagttgcttgatgttcaaaatcctttcaggggctaatagtgatattatgcgctacaccatgcttagaaaaatcggtgctcgcaatgggcttctgaaaaaatcgatccgcaaagagatcggcgtgcttttcttagtcccaggattattaggaatcgttcacgtactattcggactgcaaatgtttaaaatgctattgagtgatccctatgatcagatctggttaccatttgcgatctttgttgccctttatgccgtttattatcttttaacggtatggctctacaccaatatcgttttaaaaaataccggaaaacaataagcacccgcaaaatgaacacagtgaaatagacagcaaaaaaccaacgtccagtgtgaactgacattggtttttattttgatctgaagcactcgtctttgttttcgaaaatgagctgattttctcagcaacatccctttaacagcttctatgtcaacacatgctttttattggattcagttggttggtttatatccgagatgcatggctacagtacctccactatagcttttgacaactatattagtcagtcctgctgattgaaagtagtgagacaactcttctttgccaggaaaatctctagctgattcttgcaaccaagaatattcttggtaacttttagcaaacagttttcctaacagcggcataatgaatcggaaatacgcataatacagctgccgccaaccaattaaagtgggctgtgatgtttccagacaaaccacttttccgctaggttttacgacccgctgcatttcttttagaacggttacaagatcaggaacatttctcagaccaaacccgatcgtcacaacatcaaacgtattgtctgcaaaaggaagtgccattgcatttccttgcatccattcgatctttgtcttttgctccgctgcttttttctttgccgcagccaacatattctcactaaaatcaatgccgatcacgttcccagtagatcctgttgcttctgccagtgccaatgtccaatctcctgttccgcagcagacatcaaggatatcattacctgcttggacttgcatccgtttcatcgtatcttttcgccagcgtttatgttgttgaaaagaaatcacagtattcatctggtcatagttctccgcaacacgctcaaaaacgtgatggacacgtgcttccttgcctttgtcgcctatcaacctctacaccatccttttgccttccaatcacgcaacctgcgtaaccaaacgattgaaagctttttccatttactacaaaatttagtgtagcatggatagtcaaaaaagaaaaaattcctgtttaaatctgcatattttctattaacttctctattcttttcgctctcagttttcgtaactcttcaaaccattagtagaattggtggtaacgcagcagaaaggctatatagattcaggaacatttctaaaaaaaggctcctgcgacatggacacatcgcaagagctttctcttatagatcagcaattatttgctttggtccagtttcagcagttactgatttttttctttcttgatttgaagaaaccaagactaccgatcgcaaccagtgcagcaccgatcattgatgcaaaccaagtactttcactgccagtttcggcaagtatttgcctccactattattactattgatgttgttgccaccgctgatgttcccattgccgatgatattgattccaccgttattgccattaccgatattatttcctccggtattgccgccaccagtgttaccaccaccagtgttgccaccgccagtgttaccgtcgtcaactccagcaaccggtactgtgactgtagcagctgcactgcggtattctttgccaccagcaacgacactcgcaacaacatataaattatcttttggttcgacgcgattggctgctactacgatccggtaattgccttcactgtctgtcgtaccagtgcccaccacttctccttgagcattagagatttcaatggttacatttggatcagctttccccgtaaccggatacccagatgattcattgccgctgattgttgcagtaggtgcggcaaccgtcacgggactaacgacgatactcatcggatcactgacatatttcccatcagtttgtgcagtagccgtcaacaaatcttcttccgatagctcggctacattgatacgccaattgccagcttcatccgctcttaattcaagtggtgcggcaaaggcacgggtggtgttcaacccacccagaattcgcgccatcactggtgctgcttcattgatgatcagaatgactgaagaacctggctctgcggttccgctgactgtttcgtccccggcaatcgctggatcaatgagtggcgtagccgttttttccataggtactgtgattggtgtattaccactgcggtagtctttgccaccagcggttacgatcgctgcgacgttcaagttttcttctgggtccacttgatctggcgcgatcacgattcggtaattgccttcttcatcggctgtgccggtgcccacaacttcgccttgagcattggtgatttcaatcactgcattagccactgtttccccaacaacgggatagccatcggtctgattgccgctgattgatgcggttggtgcatcaactgtcaagccatccactgttactgtgattgggcacttggatccttgccatcggtttctgccacgacagttatagtgtcgccttccgaaacttctggtacttcagcggtccagttaccttcctcatctgcttcaacgacgacgggatctttgtcgccattggtgatggggacagttgaacctggttctgccgttccgctaattgtatcgtctccggctgtgacgggatcaatcgttgggattcctgtttggttgtcttctggtacagtgatcggcgtgttggcgctgcggtagtctttgccaccagcggttacgatcgctgcgacgttcaagttttcttctggagctacttgatctggcgcaatcacgatccggtaattgccatcaccgtcggcagtaccactacctacgacttctccttgggcattggtgatttcaatgtctgcattcgcagttgttcgaccagctacaggataaccatctctctggttaccagtaattgatgcagttggtgcagaaacacttattccgctgacgatgacactgacgggtgtacttggctctttgtcaccaacagtagctaccacagtcactgtttcgccttcagaaacttccggtacattcgcagtccaatcaccttggtcattcgcaacgaccgtcactggctcttctccgctgacagttaccactacattggcgttcggttcagctgtaccgctgatcgtttgatccccggcattcaccggatcgatcgacggcgtttcagtttggttttcttgagtatcggctggcacaacaaccggtgttgctccactacgatagtcttgccctccggcagtcacaattgctgtaacattcaagttttcttctggggcgactcgatcgggggcaattacgatgcgatagttgccatcgctgtcagtcgttccactgccgacaacgtctccttgagcgttcgtgatctcaatcgctgcatgcggtgttgctttcccaatgaccggatagccatctgtttcattgccactaatggaggctgtaggtgctgcaacggtcaaacctgcgacgctcactgtcactggctcgcttggatctttgccatctgcttctgccacaacggtcactgtttccccttgagagacttctggtacctcggctgtccagttgccttgggcatccgctactgctgtgactggctgttcatttccgatagtcactgttactgttgaatctggttctgctgttccgctgatagtggtgtcaccagccgcaacaggatcgatggttggtgtttccgtttgttctgctgcaggttctgctgctaaccagatggaattattgccatcctcatctgtaaataaatcaagtgtgagtagattagattgagaaaaagtacctgcaaatcgagcttcgtatggattcgacggattcgtcacaccatttgcaatcagctctgaagtcgttggtgtcgtcacggtcgttggcatccaactgtcgtttgacctaaaacagatgccgatgcgatttgatcagcaagatctgtcgttccattcaacacagcttgtgcagcatcgacggtaacattcagagtggctttagctgtgttgactgtttcttggacaagtgtattgacgccatcgatcaatgagccaatcccaggaatgttacttgctccgcccaagatgctcacttggatttgcgcctgtttcaagttctccaaaatggattggatgcgttggttgaccacaataaataagccgtcattcacattggcaatcaaggcacgttcattatctgtcaatccagcaggcacttcaaaatcggcttgtccaaattgtcctaactgattcaataaatccaattgttcatagatgtcatctagattgacggatactacttgactgatatcaacgatggaagctgcttgatacaataaatttggaaagccattaatcgtctctggaatccctaatgcatccgctaagttctgattcacaagagcatccaccgttcctaccaatgtgtcaacagcaggcgtaagcgttccaatcagtgtttggatagcggcaatattttcaagttgcagagtgatatttgttgatacccgggcattgccatttggttgtacaaagccagtcagcccttttggcacaccaacgattgctactttatcaccgtttaagacgtcaagcgtcaccgcattcgatccgctgatggtaaagttgactgggttggtatctccaggatttgaatatggcgctgcagcacttgttgcagaatcatttgatgcttggacattactaaaaatctcagcagaaaccaatgatgcttctgcgatctttggttcccacaacaatgtagtgggaacaaccacagaactcgtcagtaacatcccgctgaccgttaaattcgctagtagcgattttttgtttattgcgcgtctttttctccttgaattcattatttttttatagtcattgcccttcattcttactcctcctattcaaataaatacaaccaacaaaagtgaccaaccaactttggcattcgtcttttgatgttcgctatgatcacatattcggagaaagagatcacaaacaaaaaacgtttacaaaataaaaaaaacacccattcaaatactcgaaaaaatctcaattacatttttcaacataccaaaacgatttccgtgctttttttgtgattaaataactaaaatattcatttatttaagcaaattctaacatttttatttttatacaacaaattattaacaccatgaaaaattaaaaaaaattttattggaaataaaataacaaaaatcttttacttttatcgccatcgttaattatttattacctgtgctcctctttacgcaaaaaaatcattaaaaagagatttttttgattttactcctttttattaacaaaaattagaaactttttaatgttctcagaatacgcttccatcttttcttctaatatttattttgtaaaaaagtgaaataagaattattttctgaacagtattctgttttttttaaatcttttaaaaaaaacagaaaaaaactccttaaaaaaggcgattttcaccgctttctcctttttaaaacaattttcaaacaaataagccaccagaaatcgtgaatgatttctgctggcttagaccattttatgagctacttctaaaggatcaatcttgtaatttcttatgcataaacaacgttgtttctcgatagtcatagaagatttttgagaaggccatcaaatcaccttctcgcaagtaactgtcgtctcgaacaaccaaactagggctccccgcgttcatgccaaaaaaagcagcttgtttagcagtcagtaattcacagcggataaatttatcgatgaaactgacagtcactcccttttcttgtgcaaaatattcaaacatggaaccgtacatagcagattctgggatctgaccaacgatatctgccagataataggatttctcaatcaaatacggctgatcatccagtgtgcgaaatcgttcaacttcaataaaaagctgattatcagaaaatcgctggtggcttggtgaaaaatcgatctcagcgtacgagaccaaacgctgtgttgcttgaacggtttgaatcagttttccttctctagcaagatcttcggtaaacccaagatcactttggactgctttttgctcttgcgtcaattgatcatggacataggagcctctgccttgaacttggtaaatatagccgcgtttactcaatctgcttagtgcttgccttaaggaataccgagagacttgatagtgttccatcaattctttctcgctaggcaactttccgttgcgatcagctaaatcctttttttcgattcgtgcgattaaatctgcagctaataaatcgatcgtccattgttttgtcatttcacttctcccccaatgttgtactactcctattttaccgcaaaagctattgccttagtgggaatctttatttctttaatatcatgaagacaaaagaaaacccagctaagacatgtttagctgggttctgctgattcaaacttacactttcggtcaagcttttccttgttcttctgcaaatagtttgccatcatacattttgatgaatgggaaccaaataagaaaagcaaccaaggcgcaaattagcgcaaggacaaatgcgcgccaatcgccgcctgaaccgataaaccctgaaagaccaattggggttggccaagcgacttgagcaatcggtggtttgacaaaccctaaattgattgcaaaatatgccaccgacatagaagccattggtgccaaaaagaaaggaattgccgtataggggttatacacaacaggcatcccaaacaaaattggttcattaatgttaaagaatgatgggacgatcgcggctttacctaatgcatttagttgtgccgatttagcaaagaaggcgatgaagatcaccatgcccagtgtcgctcctgaaccgccaatggtcacgaaactattattgaattcaccggcaaaagcaatatttgcaccgctttggttttcaaccatgttggaaagaacgatgggcgtcaagaatgaggtcacgatcgttgctccgtggattccgacgatccacaatgcatgcatcaagaaatagatgactaacaacccaacccacgtactcgtcaattgcgaaacaaaactaaagggaatcgcaatgactttgaagatatcggtccctaaagctactaaagcaccgttgatcacgatcacgactaaagcaatcaacgcagtcggaatcaatgcagtaaatgaacttgaaacaccagttggtacagtatcaggcattttgatgtagatatttctcttgacacaaaacgcgtaaattttcactgcaataatagccataataattgcagtaaaaataccagtcgttcctaaacgtgtcacaccacccgccatttcccaaccatcaatgattttttgatcatcggaaataagggtcacaagagtcgctactccgccttcaaatactaattgaggtagacacatgaagaatgccatcattgacaacaaagccccgtttacaggacttaacgaaattttttcttcctgcgcttggatcttggtatattcataaccaaaaacaatacagaaatataaggccaagatccccattgttgcagtatttcctagcatatataaactttggatcttatcaaaagaagccgcccaaatcgatgataaagctggaaaactttgaggtaagacactaataatcaggaacattgaaccaacgatcgtaaacggaatcgaagccatcccggccgccatcaccccacggacgattcgaaattgcgagattcgccccattggtcccattaagtacttatccagaaaggtaaacattttactattttctgtgttcatctatttttcctcctttattctcaaatgtccgcagatagttcaagtaactatcccgatctttttcgatcaaccatgcttttcgttccatatataaacaacaaatcaatcccagagtcagactaaccagtaaaatcggtctggccgcaagattcaaaaatgggaaaaatccgtcttgccaccctaacaggataaaaaggataccagtaatgttgacccctgtttgaatccaataaccaactttagtcaagtgcaatcgatttgatgtctgccaatatttttgtgtctgctcaaagatgatggcgccatcgaccaaaagcaagaacaccggtaccagacccatcactgtccaatttgctagactaagcaacgcccaataaagattgataaagaaaaaaattgctgtcatatagcgaaaaatcagatagcggttaaatcgcatatttttttgtgcgtacgcattggcaccggacgactgattttgtcctctcatagttatgatccactcctctctcatcatttttatcgcgaataacaaccaaacttgttcgaacaagttaattttagcataaatcaaaaatcatgcaagcgattactttttgatatttggttgtaaaaaataaactcctgaagaaaatcgtctatattcgcacaactttttaaggactattcaggtatcttctagcaaagttttgctcttgtgaaaacggggattttatgttaaaaatgaataaaaggaatgttgattcaacaagatgttcgcttttcaagttataaaaaaaggtttttggtgtaaaatacttactttaaaaggagaaaaacgaaaattatggcaaaagaagtaacctacgaatttatcaaagaaattcccaaagctgaactccatctgcatttagaaggaacattggagcctgatttgaaattacgattggcacaaaaaaatcaaattgatattggtcaatcaacaatcgaagaggtggaagcaagttatcagttcgactccttgccttcttttttgaacatttattatccagcgatgaatgtcctccaaacagaagaagatttttatgaattggcaatggcttacttcaagaaagctgccgaacatcacgtcacttatgctgaagttttttttgatccgcaagcccatacctctcgcggtatttcttttgaaaccgtcatcaacggctattatcgagcgacacaagaaagtgaacaaattggtgtacgaagtgccctaattatgtgcttcttacgggatttttctgctgaatcagcagcagaaaccttagaacaagcactaccttttaaagataagattttggggatcgggcttgattcggatgaaaaaggcaatccaccactgaagttcaaaaaagtttttgaaaaagcaaaagccgctggatttcatttgacgatgcactgcgacattgatcaggaagattcgatcgaacacattcgccaagtcattgaagaaatccaagtggaacgaatcgatcatggaacaaatatcgtagaagatgaacggttagtcgattatgtgcggacgcaccaaatcggattgacgtgttgccctgtctccaacagtttcgtcgtggatgatatgaaaggaaaagaaatcatcgagttattggcaaaaggcgtcaaagtgacgatcaattcagatgacccagcttatttccaaagctatatttctgacgacctttatgcattgagcaaaaattatcagctaacagaggaccaaatcattcaattggtcagaaatgcctttgagattgcttggttaccagaagaagagaagaagttgtatctagcggaagtcgatgcttttgtcgcggagaaaaacaattaatttttattcttatacaggcaaagctgcacaagggtaaaacaaacaatcactccaaatacaggattggagtgattgttttttgcttgttcactaaatatgaagatctttcttacaaaagaccatgcccgatgccacgaacaggatacacgctccaatcaataggacaaagattccgatgagaccactacgatctcctgcgatcaaagcatctggatcaaacaatgtaaagaaagtaaaatactttactttttctgcatttccgccggtgttggcaagcatctgtaagacgtacattaatgctggtatcccaccgccgacagcaatactgtattttgaatcattaaaaacacaagaagctaagaaagagattcctgcgataaacaactgcaaacaaagcaacccaccattcagcagcaacagtttgggaatctcgagttctcctttaaattgtaatccgcaaaggatctctaatgcagtgccatagatgatcaaaaagaaaatacccgttaaaagaaccgacatctgcgtcatgacaatcgttctccgcttgatgggtgctgccagaagggccaccatcgcgttgctgtccacatatttggcaatcaatgcattccctcgaagaatcgagaataccattggaaaaatgatcaaaataaaaccatagaggtaagaagacatgaaacccaataatgagttagcgccggctttcatgccgactgccgacatcaattctggcagcatcttgcgcatttcttcaagagactgcatcatttctggattgtacatactgacaatgattgagatgtagagggtcatgacggcaccaaaaatcacaagcgtcaggatgctgcggcgcaattcgcgtttgtaaagggtgaaattgatcatttctcttcacctccataataatccataaaaatctgttccaatgtttgactcgtactgacttgaacttgactaggttgtgccggatcgatttctccattgaaatctgctgcaaaggctgccgccagttgttcatttggcaaagtgacggtataacgacgcagatgtttttctcttaatgtgtcggtggaatccaacgcaactaattttccggcacgaatgatgccaattcgatcacaggtccgctcaacttcttcaaacatgtggctagacatgaggatggttttgccgcgctttttttcttcagtaattaaatcaataaaacgtgactgcatcaagggatctaagccactagtaggctcatctaaaatcaagatctctgggtcgtgcatgaaagccacaacgatgccaattttttgtttcatccctttactcattttcttgatcttgccgttcggatctaactcaaatcgatcaagtaattctttggcccgtccattttcagcatttccccgatactttgcgataaatttaataaattcgcttccggtcatatcatcaaaaaaagtcatttcgccagggatgtagcctaaatttctttggatttgttctcgttgctgccagcaattcatcccattgatcaaacagttgccgctttgaggtttgatgaaccccattagatgacggatcgttgtggtcttcccagcgccattaggacccagaaaaccaaacgctcctgcttccacagaaaatgacaggtcaaaaattcctttgccattgccataatctcgtgtcagattggaaatatcaattttccccatcattcattcctcctattgaccaacgtctattcactagcaaatcgtttgctggtttgcccacttgctttttgatactcccgctttgcaagtgatcagtcaaggccctcggtctttgccatacatatcgtatgatgatagccaaagtatagcctatgttgctgtttttgactaccaaaatatccaccgtattctagaaatagtctgaccaaaaaaagcgcctttttaagtcgcgaattgacgaaaaaaagcggcctcttccattcgaagaccgctttattcgacgattgctgttaatatgatttggaaaaatgacgcttctcattcaattagaacttaaggcaccaaatcatggtcaacataaaaggagtttatcaagtaccaagaaaaactgtcattacctgtcgataatgcgaaaacagtttagacaaaaggtgccttttgttccttgatttcagtttacaaaaagaagctgcacgatacaagaggaacgagtaagaaagctcctgtctgggtccttcacttttattctgactaaatagaacacctattttttgctgcttgtcgtctcctcgtgaataaattgctgccaacgggctctcaacttctgacgataataatagcgagactgttttgatccctcttgattgacccaatcaagccacatttgtcgttctttcggtttcagaaatgcccagaattgcatcagcaatagatgattgtcgatgtcttctttcagatcaatcgtttcttcctgctctgatgcgattgcttgaatcagttgtttttgacgattactttttcgttgtaaatcaatcactcgccatagcaaaaagccaaatagataattcacttcattttcgttgcgaaagatcccttcatcaggataccttcgtgcgcgctcaaagagcatgagtcgcaactcttgcaaataatcttcaaaatctggatgactggggaagatgcccgcccgaatcagcactttgtaaaagaggcgctcataagaagccatcagtgtatgccattctttcattgtattcctccttttgcttggtgttcccgcgggtacattaaccatagcaaaaagaggaagtgactatttttatcaaaaatcaataaatcatttgaattatgcactttttattgcaaaaatagtcagataattttatagttgaagtatctaaaatgaaggagtttttctatgaagagatgctactcccctataagttcgaataaacttgatccttatcgtctgtcctttgagccaaaatgtaaacgattcctcaattctagtgatcaggccacttgccaggaacttgctgctttgatccgtccaaccatgacaattgacttcgagaaagaaatttttgccattctgccttttgttcgtgatgatcgcacgcattctttgatcatttatcaagactattgttcacttcttccacagccgccatttcctatcatcaaacagattcttctccatttccatttttatgagtacgcgcttttcaaagatacactgtaccatttattcagccagtcgaatatcaaacgtcaatacaagattccttgtgcaactagcgaatacagcttgctaccactaacaaacgccaccaaaaaagacaccatttgggtcaatcctggaaaaatcatgacgttgtccgcttctggaccgcagctgttcattgaactgcacaatcagttctcttttcccagctcggttgaatcccgtcgtctaaagcaaaccatgctgatcagttttcttgctcatggcattatcaaacgggaacatagctatcaactgcctcgggcgaatactagcctcactgaatttctggacctttctttttctcctctcaccaatcatttactaggggagcttcattttcacgatctccccggcaaacgaggaagttttagtctgatttatcaagatctctatgcagaagaaagccaacaaaaaatgcgccaaaaatgagtgcatttggccaaattttactcttaccaacgcatttgatccaaaaaggggcaattgcaattaatttaaaagaaaatgcaaaagaaaaaaattttttgatcttttcgcgtattttatttttgagaaacaaaaaggtactagtttaagaaaatagtgctctaagaagatagtgctttaagaaagtagtgctttaagaaaaaattactttaagaaaatagtggcggaatgctgcgaaggaggaaaactagtatgcgtattgttaaaatttcagagacagagatctatgtcgaaatgacagggaaagaatcatttacagttacttgcagcagtgagcagctcgctgagcgatggctagcgttgttagaaggtttagccgagtagagcaactgatcttcgaagcaagatccgcaagcgaaaccgcaagtcagctgaacccattggcagttggctgatgcaatgcctgaaatgcctttcttttctcaaaagaggacagcaagcaatgaccataataaaaagcagcggcaaaaatgaagtgtgtccgaaaagttgacttttggtccaacttttcggatcactgcaagcagccgctgctttttttatttagaggcctaattcagacgcagggtcaaagaagcctgaccatagtcctgtcgccattcccaaatgtagatggacaccagtcgaatttccagttgttcccattccaccaaggtattgacgtgctgtgacactttgaccgctactaacagcaggcaatgcattgaagtgcatgtaataactatagatgccattcggatgctttatgatcacataatttcctgtggacggaccataaccggcttctaccactttcccaccttgaatcgcataaatcggtgttccactgctgccggtaaagtcgaccccattgtgctggttgccggaagagccggttggatctgtacggtaaccaaagcgactcgagatatggacagaatcgaccggtaaagaccaaccgctggtttgtttcccgctggcaagtccaggtgtttctgaattaatttcgggattggtctctttgttgcttgtttcttcaatgctggtctcttctttgattggttcagaagcattcgctgatgtcgttacttctgaaccagtttcatttgcggattctttttcttgagaagctgctgtctcagcgactacctctttttcaacttgttcctgagcttttttttcctccgcttgggcttgtttcttggcttcggctgctaacgcttcttctgccgctaattgtttcagtgtttcttcccgtttctttttagcagccgctttttctgcttccaagtcagactttttgctctcttcttgattcagagacaatcgtaagtcggccaatgccacatcctgattcaatcgtacatctgcaagctcttcttgcttttgttgcagctcgctcgcatgagtttcaatttcggatagtttttcttctagttctttttcgagcttgatacttgtctcgatgtctttttgctgttgctcaacgatactattgctggcattcatgatggtgacagaagcaatggctcgttgaattgcttcacctagtgagtcagcatcaagcaatgtcgtcatcatggcattcgaaggttctgaaacttgaatatctcttgcttgattcgccagtgtttctttccgtttggcgattttttcctccaattccttgatttcaaccgcgattttgttgaccttttgctctgtgctggcctttgacgccaaaatcgaatccatttcagattcaagttgttggatctccgcttccgtcttttgtttgaacgcttctattgaagcagattcccctttgatttcattgattcgctgggtttgttgttgaatttgacgatcgacatcctctgcgtttgcaaccaatggaaaacctatccacatcaatgagcttgcgactatcaatttttccagttttttcatgctatctccttttgaatcctacttttcatttctactagcataccgaatattttgctgcttttgggcagaatcacaggaaaaacatctggatgcaaaattctgacatctcgttgcaatcaacttgttagattcccgcatgaatcgtaaattgctttttgattcttttcagactaaataaatcggaggtttgttacacaaagagatagaggcatgctcactcattgcgcacgcctctatctctgtttgattttcattgaatgatcgacaccacagtcaattgaatcgtccagttgccaaatcagctgcagctactacaatcgcttcttcaggaaaaaccattccggtggtaaaagcattgggataagctaatactttcaagcccgcacttaaagcggccgtcaccccggttggactatcctccagtgcaataacttcttcttctgacaatgccaactgtgcaagacatttctgatatccctcaggagctggcttgccttccttcacatcatcccgggtgaggataagatcaaaaacagacatcaactcttgatgatgagcaaagaaatgcatcaattctgctttccttgaattagagacgatcgctagcttcaactggttctttttgccatactggataacttctgcaatgccttcccgcaatggcacctcaggatacttcgttttctgtgcttgagtaaaacatgcttcaatggcttctacatcgacgggcttccctagagacttttctaagtgttgataaaacaccccgtctgctgaaccaatacttttttggtaatctctccttgtataggttacctggtaggtgtcacgaaggtattgctttactgcttgataagcaacttcctcggtatccacaagcgtaccatcaaaatcaaaaataattccctttaccatgtgctcccccattgaatcttttagaatggatcttaagtttcatttcaatctacttcccgaaacgcagcgaaatcttcatagaacgtcttggggggtacatccgacttttgccgctgcttgttagggatgaaggtcgttccagctacttgcgtaaaactaaaatagtgtttttgcccggtagcctcttgatggtatccagattgttccccaatgtataaatcatctactgaactgatcgtctttgtcgttatttgtgatgatactgaagcatacagctgaatctctgaatcgacaatgaacaaattggaacgctcgtcttgaatgaattgattgatcaccgttgccagcgtcgctaatttagaaaaattataacggtgcggcaggccaaatcctaaaagcaatactccgcctactaccaataccatcgcactggaccataaccactgctgctcaccaatcatttttgtgaccgcaaagatacctagagccccggctaaaatcaaagctatttttatcatccccaaaactttgatatagcgtaaccgactttctcttgtcagatggtctttcccccaaggaaaccattctggtgtcgagatatcaatgatcaatgtgtaagtagcattttctctgaagaagtagtttcctgattgctgacaatttgtagcttcagttaaatacttaccgagccattgccgaaaagcttttttctgcttctgagtaaaaatccgaggaaaatacaagcaaagaaattcgaacagttcttgtttcatttttaatacgctactttccgataatatctgcgtgttttagcactctttccagttttttctgtatagacagtcaataatagatcaaagaagtgattcaaaaaccacggcatcaaaaatttctgtgtttcttttgaaaaacgatccaacccaaactcgtttaaatcaaccgttttagcttgcgcagagtgagaagcaataaagcgttccacccgttgatcttggtcacgattagaatcagcgttcataatcaagttgacttggtaatcctcggccaccatttcgaatggaccatggaaaaattcagaagaatggatcggctgtgcttggatccattgaatttcttccaaaatatagttacagaagcaacaaacttcaccccataaacgtccagatgtcacccacatttgcggtttcgccacatcgacagtcgcaatcagttgttgcgcgaattctttggccccagcgatggcttctccgacaaatgtgccaagttggagaatttcttttcgcatcttaaccagtttgtcttgatacatttgagtatagcactcaatgaaccagccgaacagaaccaaatggacatctgtatcaacagagctcgtccggtaatcaagaatatccgctccatccaaaagtgtgtcatcatcaccgataaacccataaatcgttgtttcaggataaacttgatgcactttcccaagtgtatcaagaatctcttgcgtagaacccgtctttgtaccagcaataatcaatgtttgatcatcgatttgatcaaaataaaggcttagcaactcttccgggctgacaatcaaaaatggcacagataatttttcaaacaatagtggtcttaatccgacaaatttggtgaacgttcccccacaacccatcaagaagatcttagtaaatttctgctgcttcatttcgtcagctgtttctttcaccgcatctaattgatcgatcacttgagaatagttgctaataaattgttcttttacaaatggcatgagtttctctccttttttataccgctaaaaatccgaataccgcccctaaaatacttacagctagaattgccaataagatatagaagactttgacatcctttttcaacaaacggcagaataggaatgtgattagtaacggcaataaggctggcatcatcgagtctagcaatccttggatcgtttgcgcatctttaccgctggtcaatttcactgggatattgatgatcaccattgaagcgaccatcccaccgattacggtatttcccagaatattgattgcataagtgatattatccatcaatccgcttgacatcttgtcaataaaagaaaccccggctttatagccccacatggtaccgaaataacgaacgagaacattcgggatgttaaatacgagcagaaacaaaatcggaccaagaatacttccttgtttcgctaatgaaatcccgataccgctggcaatgatccgcaaacttccccagaagatcgaatcaccgatacctgagatagggcccattaatccagctttcatggcattgatagaagattcatcaaaagaaggatcatttgctttcttttcttccattgaagcagcaacacctgcaatgaatggagaagtcgctgatgtacagttaaagaattccatgtgtcttttcattgcttttttctgatcatctttgtctggataaagtttttgaatcacgccgcccatcgtataggcaaacgctaaactcatcatccgttcatagttgaatgaagcttccatcggcattgatcgccaaaagacgcccatcaaatctttctttgcaatttttttagaagtcatcatattgttcctccccatccgtcatcacttgccctttgtttttttggatcgcatcaaaaatgatgtacatgatgcctgcaaaaatagcgccaatcattgcagttgcgatcatatctaatttcaagtacgcggcacaaacgaaacctaagaaaaagaagggtgccacttttttagagaaagtcatattgatcaacatagcaaatccgacagcaggcagaatattggttgcaatattcatcccatcaataaaagcttgtggtattaatttcaaaattttatcgactgtaccgctgccgattacataggcaacagtagtcacgactgtcatcaatccaatccgagtgaaagatgcccataaatgcatattggccgcttctttgatcttgccttcttcaatcaagtgatcagctttatgagtcattgccggaaagatcacaacatataaaatgtttttgatggctaatcctaaggctgcgatcggcaagacaagtgtcaatgccacatcgacaccataaccattttttaaaacaagtgcggtagccaagattccgccgataatttcatccggcggcacagtggcgccgacgcccatcaaacctagaaaggccaattctaaggttgcgcccatgatcaagccttgggtcacgtccccaaataataacccaacaaataatcctgtgactaagggacgaccaatgaaggaagaacctagaaaatcctgcatatttgctattagtgcaataataaaaataccaatcgtttgaacaatcatcatccttactcccttcggctaaactaacgatctgaattctatattggcatcatttggtgcttgtttaactaagatttcgatgccggaattttccagttccgttagttctttgatttcctcatctgtgacatagactgctttcgcaatgttcttgctatcgtcacgctttgcggataatcctaaattgattttgttgatttccggagttccttttgccaatcggtaggcatcatggacattttctacaacgatgaacacattgtatttatctgtgacaccgcttttaattgcagcaattgaatcgtcaatacttttaaatatcaatttcgtatcattaggttttgccaagttcaatgtttgctttctaaatgagtcgttcactacgttgtcatttgcaatcaaaatcgcattggcagataaattttttgtccacgcaaatgctacttgtccatgtaataaacggtaatcaattcttgtcattttgatcatgttgactctctcccttaaaattcgtcttcatctggttgatctggatttacttctatcaatttgatcccacttatagcggttacaatcacttgctggagttgttccttaatctttgctggttctgcagaaaaactcattgaaacaatttctaataccaatggcaaattcatccctgcaattagaaattggttctcttttcctgcaattgtttcagtgatcacacggttgacgctccctccaagcagatcactgataaatatgattggttcctctgtcatttctgagatcaacgctgtaagctgtgccgaaaagtcaaccttctcatcaacataggcggtgatcgcagatagatttttttgcttccccataataaattcagccgtatctttcatgccttgtgctaaattagaatgactcgccaaaacaattttcatgtgtcttctcctttcatctgtaatcgtttcccaattacttacaactagataatagaaccccttcgatagaaaaacaacaaaaaaaagaccaatttcttgaataggtcttttttagcaaccaattttagaaccacttaatagtcggtctctacattgaaggttattttttctggattaaaaaaagattttgtatattccaccaactcattctgatcagtatagccataatattcaatacataagacgtattctccaggccgcatattgattttgctgaactgtttttcgtcttccactcggctagcataaaactgtttcttgaatttgacaggtcgcttatttttgtattccatatagtcatagagtgaaaaactaccaaaatcatagcgatgagcatctttaaataaacgaaaagggaaataggcaatttgcagggatactttgtcttcattagcctcccgcacccggatcaattcaaaaaactcaaagtattctggaaagacagccatcaactccggatcatcgtaaaccagtttgaaggattcaacaaaactgctagactccattcctttgattcgaatcccttgtgtcaaagatagcggcgactcgtctccaacctcaaaacgattggaatgtccttcattggacaggaaagttcccgcgccccgctttttataaagaacaccatcttctaccagggaaccaatggcttttttaactgtcatccgactataccctaagatatctgccaattcacgctcactcaggatcttatcatttgaaccaaagtcgccgccttgaatcatctcaacaatttttcttttggcttctaagtacaaaaactttcccattgtctcactcctcaaacaaatacgcatctggatcagagatttcttcttcgtagcggatgatcgttttatcttgatccaaaaaaaaggttttttcaatcagcacttgactgtctccaatgatctgcagttgctgtgcctcgatttcattcggccatgacagggcaatctcttttctaatactagataccccttttgactggtctactaataattctacatcagcattttttctttctaccaaataatcgactggtatccacgatttcagcaaagcaacaggtttcttgcctttctgcaaaagaaactcccgctgcataacgtcgccgatacggtcgtcattaaacaacacattataaaaatttttcttttctgcaatcgtctctgatgataacgttaattccagtcttttatcagcgactcttgcgaacggtgtatgatattctctgatttttttctttattctcattgactttcccttttccttacgcattagtgctacgtacttcggttctattatactgaataattattttttttaaaagatagtcttctaatgacgccattccgagacagaataaatgtgtctggcatacctttacttagcagaaaagacctggaatctctttctgatttccaggtctttgcttttttagttcttcaggagactcctgttatgtctcttctttcactgcaactatcaaacgaacacgatcatactcagtttccctgtaacactcgcatccactttagcgataatcgccgtccttctgcttcgaaaaaaactatttcaatcgtcctacagccgatccaatcgcattccctgctaacagccatgccttcgctgctttttgtaaggtggtgttttcggaatacttgctgacatcgttagaaatagtattgaagagccagagtacgctgtcatttttttctggttctgtcaacagcagttcgtagtcatttccaaacaaaacgaggttggaagttgctggcagccattctttcaacttgggcgaaagcagccaagtatccgtcacaattggtgctgaagcgtatgcaggaaagtaggtttcaaaaaacattctggctgactgataattttcttggacttgctcatgaaccagttttgcatctgaagggatgtgaagagaaagataggtttgaccttcaagttgtggtgctttgctcttatgatcagcggcgatcatttcaaattctagctgatcgatcctaaattctaatccgcacaaataccgccatgtccaaaatccacgatcaaacacatcctgattaccgacttgtttcgtttcttttaagaatcgagtaaatgccctcatcgtagccaaataaatctcatgaggaatttgcagcggttgataaatatgtttccagctgatggtcgctgcatacaaatggatcgccaattccttcatcgactcctctttgtacagttgggataaccacttggcttctgctgaagctgttactggatcgagcaatttatgtacactagtaatcatctcttgttcttgcagctcctctaaggctgcgttcactttctcttggactaaaacggggatttcaattaaatccatcaattgctgtaatggctcactgttagctaacatgttgttcctcctattatcaacgtggaatctttctttttgatcaatgacatcaaagcttgtttgtaaccgcttcatccaattataaaaattttagggcttaaatgatactaaaatataccggtttatactaaaatcctaacccatttattgcttcaaagaagatagactcatttgggtcgtctctctagacaattttttcacgaagaaatccgtcctctatccgaaaaggcactctcacacgtttcttcaagaatctattcgtaagagagcgccctctataggatagctgaaacagctaacttctggagggcgctacatcgtttttcgataacagttctttcttgattgtactttcttaatatttcttttttattgcagtaatgacgattgttaaaagtgacagtttttcaaaagtacgatcggcttaatagcaactgctaaatcacctagataggatgtttagcagtatttagttggggctgttttataaatcacagccccagacttcattgttgcgataaatcgctagctcctgaaagcctaatttctccgctgcagttcgttttccatttgccactgcgatcatctcagaaaggattctttcgccaccttccttgatggacatttcgccggtaatgattgcagataactcaagatccatatgttcggtcattcgttgatacgtctcatgattaccggtaatcttgatcattggtacgatgggatttccaatgggcgtgcctctccccgttgtaaagacacagatctgggcgccaccagccaccatccccgttacagattcaatatcatatcctggagtgtccatgatgatcaaccctttttcagtggcgatctctccatatttgacgacttgattgatcgtggcgtgtcctgctttcatgattgcgcctaacgatttttcttcaagtgtcgtcaaaccacctttttgattaccaggtgaaggatttgctcctcgaatatctacttggagacgttcaaattgtttttcgagaccgccaatgatagtctgaatatcccgtttgacttgttggtttttggcacgacggatcaagatatgctctgtaccgatcaattctgtcgtttctcctaggatcgatcgaccgcctgcagctaccaaaagttctgtcgcaactcccaaagcaggattgacggataacccactggttgcatcactgccgccacaattggtcgctaaagtaagagcagatagttcaacgggttccctcacaatccgggcagccgcgcctaccagtctttctaataaaggaacgactgtcgcgattgtttttgttgtcccgccttcttcctggatgctaaaagagtagaccggtttgtctgataccttctgaacccgagccaccatttcgtgaggctgaatcgtctcacagcctaacccgacaaagactgccccatagacattgggatttaagacaaatcccgtcaacgttcgtttggtgatttctactgcatctccaatttgaccacagccttttccagctgggataaagaccgtgccggcaattcgttcagccagacggcgtgcagtttcattggcacagcccactgtcgcaatgactaaaattttgttgcggattccatattgcccatcggatcgtttataacccattattggtttcattagactctgatgctcctcacattatgtgtatgcacatgttcacctttggtaatcgctgctgtagcaatccctatcacttcgccatatttgataatctcttcgccagattcaatatcttttacagaaaatttatggtagctgtcaatagactggacaatcaggaattcatttaaggtcgcttgattaacaattatcacggatgattccgccggcgttggttgcaaaaccacggcaacattgtcctcgggacgcatcattaatgccgtatacatagactgcctcactttctcttcactcatatttgtcttgaaagacaatcgtgtcgatcgctgcctgacgcaaatgtgcgactaattgtgacaaagacatctgttcacgttgcatgattgcttcaatcactaacggcagattgaacccggcaacgatctgatagtggttagggtcaaaaaattgtgaattataataagcacagttgtaaggcgttgctccaaacatatcgacaaataccaagaccccatgccccctatccagcttgcggctttgatctaaaattttttgacggaaactgtcgacctcttcattttcagcaagtgtgtcgaacgccatctgctgtgtctcaccaatgatcatttgtaacgaatgaacgatcccttggctgaattcgccatgagaaataatttgcataccaatcataccgaccaactcctttcattcaccagaccaaagggttctaagtgcgcaaaaaagcgctcaatattcgtcactacatgatctcccattccggctaaactttcagaagtatacgcaccgatatgaggggtcaatgtgacattttcaaaagccagtaatggactcgcaggatctaacggttcgtggcaaaagacatcggcagcataaccggaaatttcttttctagccaacgcacggatcaaagctgcttcatccaccaattccccacgtgcagtattgatcagcaagacatgctgcttcatttgatcaaaagctgcatcagaaagcatccgctggttttcatctgaaagattgcagtgaagtgtgatgacatccgcttctgacaataattccggcaaagatactttttttccttttgctttgtgaatgtcttcaacagacttataaggatcatagactagcacttcagcaccaaagccttcatgcagaatctggccaaccttggagccgatattgccatagccgatcacaccgaccgttgcgtgcttgagttcaaaactattgcagctcgaccgcaagtgccactcatcatttttgatcagccgctgccctttattgatcttacgaagttcgttcattaacaaagcaatcgcatgttctgctaccgcttgccgttcgattggccctaaaactttggtcaccagtacctgattttcggttgcagcactaaggtctacattatcgacccctagaccatgacggcaaagcagtccaagatttggtgtattctgaaaaaacgtacgatcgaaagttggcgtgacactagcgataatgcactgatagtccctgagtgcctcagccagttgtgcccctttaatcgttggttcaaacagatgaaagtccacttcaccaaatgcttgcagtcgttggatatgttccggaaaaaacttaccaaaactttttgaattgactactgcaatttttttcatcgacatcccccctagatcgatttcttcgctgcttcgggaaccgtttgcgcataaatcttgatgtccttttcagctgataattgacgcaattgttccaactctgtctcggttagggcaacatttttgatgaagaactcggccgcttgtctttttggcgtgccgcctagattcaaacaaggtaacggtaaccccaactccaaacacttgatcgctgttgctaccgttttgaacaaagcaaatactttatctgcaccgaactgattggcttcccaagctgccagtacttccgctatgctgtataccttcacttgaaaaccgtaacgttttcctgaagccatataaatatccatcgaaaaatcatcggaacgcaccgcgtcatcgataatataaattgtattcgcacccgaagacttggcccactttgtcacgatctggccatgaatcaaacgactatctactcgagcaaaagtaattttccccatttgtgacaccctctttctgatttataaaattccgatcgctgccagcaatccaacgataacagtcaacaataacatcccttttagtacattcagacccttcttttcaaagtagaagtacaagcccatgactagtgaaagtggtaagatgcctggcaagatagagtccagaatactctgtaaagcaaattctctttctgacaggacaaaagataatgaagattgaatcgtcacaaaccgtgcagccgtcactcccatcatgaacataccaagaatcgtcaacgctttcatgattaaattggctcttgtcccggcaatcagttctcgagccgcttgcctccctaaccgataactaaagtggacaaatgcacgaccatagagatacgtcacaacagaaaagacgatccaaggaataaccgcaccgaaccacaaaccttctgcagcccaaggcagtgcaatcgcaatcaatagatactgcaacgtgccattattaatggaatccccgatccctgccattggccccatcaatccgacttttgttgcttcgatcaattctgttgaaacggtctgttcagaacctgtttctgccaactctttggcccgctgttcttccagagatgcagtaatcccagaaatggtactgccgccccagatcgcatcagtgttccaaaaggtcaagtgccgattgtaggcatcccgcaagtcttcaggatctttatagatttttttgagcagaggcgtcaatgcatacatcaacgctggtgcgacttgtcgctcataggtgcgagggatctcgttcatccagtaccagcgattccaaatctggttcagttcctttttagtcagtccattgttttcagtcgaagtattctctgcatccatctaggctgcctcctttgcattgatcataatcatggtgtaaatgcctgcagtcacgatacccagtacggcccaagtaaccatggtgattcctaaatctttcaaaataatcgttaagaagaatgccaaaaagaaaaagaacatatcggtcttttgaccaatgatccgaatcaaaatcgcgatcccaacagctgctaacgcactggcgacaatatccagtatatgaaagacaaccgtgccttccaattgtgtcacaacattagctatcgaatctgccccgaaatataaagcgataaacaataccggcacatgagtcagcatcgtcaatagggttggcaacagaccgattgcaaaagtaaatttcttgtcctccagattattgaccacccgatcaatgtatttggtcacaaaagaattcacgataatttttaatgtatataaataacttcctagaattccgacgggaatcgcgattgctactgccgctgtcggctctagattacccaagatagcgactgctgtagccacagttcccgagacagccggttctgttgccatctggccgcctggcgcaatctgacccatagaaatcaattggatagctgcaccaaccgttaccccttgggcaacatctcccagaacgacaccgacaaataaactcgtcataagcggactaaaccgcaaattcaagcctgcatacccgaagaagcgggcttgaatcaacgccacccaaattgagatgatcaacgcctggatcactgacatatgttttcctccgtttctaattctatcaatgccaacagtgaaaaatgaaaggcgaatagaaaccaactcttgctttttacctaggatgaaagcatttcttgatccgccaacaaaagcagcttccaataacgaaacagcgtcccattcccatgaaaaccactcgatcaagaaacagcaaaaaaggcatcagaccagcgtgtccaatgcctttgacatagcgaaataaacctcaggaaaaacgtgaaaatttcaaaaaattgcacaaagcgactagtaatcgctatcaactttcggtaaaataaacacgttggttccttcgggaaacaactatggcaacttgattggtcagctgtgtaaacttggtgactgatcagggctttctacaggtgcgccaacacccgtagaaagtgcctttttttatttggtttctattccatttcatcatatagaaagcgttaccttttggcaagagggaacatatgttttcgtggcgtttttttgaggggattttttgggaaagaaaaagaagatacggggtatcttctttggggtgttataggttttcgagttaaaagaaaatacgaatgagtgtagcttagccgtatacattattttagctagtcgtttctatttacctagtgtgtcacttaaaatattaaatatattttattgaacagaactgaaaatataacaagaagccattttagctgttaaattaaaactttaaagtttaactctattattgaaatttttttagttcattttttgttttgaaattgataaggtaaatccagcaattgtaaaattatcaattatttttttttcgttgatcaatttactaattttctttgaagttaaaagtttataaccaattatttgctcacttgattgtagtgaaacattgtctaagttttgcaggataacttcaaagcattctatattatcttcgattagccctgaatcagtcattaactttcccaaattagtgatttgattacgggttacttgaataccaatttcttcatttatttctcttctagccgcttcgataagcggttcatccttctcagaaaatccacgtggaaattctaagaattcttgaccatttcgtatgatgttgattaaaaaaaatttatcttggtactttggaacaagaatgacaccacctgttttttgttttagaaaaatcttcgctttactcaactctttgacttcaaaatacgggttatttaatccttcattaaaaacagttgtgattccccataaaatccacggtgtacgagatcgagctttcttaagtctccatgcatattgtaaaataaacaggagcaaaaagagcaacccgctaccaataactaaaaggctatcatacttagcctgtactaaacgcataatgccattgaaaaaataaattgttgttccaacaataaagaaaagtgccgtcataattttgttatctgaacctgaaaagaacttgctatagttaaatttttcttttttaaatgaagaataataattatcaattgttgctttcacatcatacaccgtttgataattttctttgtgcgtgagtaagtaggtagtaattttcaatgcatccaagtatatttgatgccaaacgcgaaattcaacaataacaaaacaaacaatgattccaataaaaaaaatcattatacccaagccattatacaaagaaagagaactatcaaattctttcaatgtagtcagatttgttatataaaaagaaatcaatataaaatatgccgcaagtacttgatctcttttagttgtttgttcccgtagatgattatttccctcagagtatatcgcttttaattgttcttctaatgactcattcattttgttctcctttttcccaccaatcagtactattgaactacctaattgaaagtatatttaaaatagaaaaatttttgtataaacaaaatcaaaatttttaattaatttctgctttattataccatgacactgtctttgctaatccctcgtccagaaaaatgttaccttgccatcctagcttttcaatttttcttgtatctacaccataacgaaaatcatgacctggacgatcatttacgaaagtgattcgtttttcatcgtgttgcatcaaatcacatagctttttgactaatgataaattatcaatttcttgatgagaactaatattatagatttctccgttcacacctttacgtaagattaaatgaatggctctacaaaaatcttccacatacaaccagtctctgatatttgtaccatcaccatagactggtaaagcttcgttgttctgcattctcatcaacatctgtgggatcatcttttcataatgttgattgggtccataattatttgccgcacgcacgatgttaaatggtaagccatacgttttatgataagcacatacaaactgatcagcactcgcttttgatgccgaataaggagagcttggatttaacggacaattttcatctgcataaccttcagacagcgatccgtaaacttcatctgtggaaatttggataaaccgaatattggcttctttcgcacaatccagtaaacaagttgttcctagaacatttgtttgtacgaataaatttgcatctttaatcgaattatcaacatgagattctgcggcaaaatttattaaacaatcaattttataatccttcaacagtcttctaatgagctgcttatctaaaatattgcctcttacaaatctataacggtgatcaggggaaatctccgataaatacaaaatacttgaagcataggtcaaaatatctacatttaagataaaacaatgatcatcctcttttaacatatgtcgaataaaattgctgccaataaatcctgctccaccagtaatcaacaaattcataatttcccccctaaatgaccttcatccgaagtctaagaaatttacataactcatagcctatgaaacatcctaaccaatttaatagaatatcactgactgcaaaagttcctacataaaaaacatattgcagagtctcaatacctaaaattgttagcagtgaagtaaaaagaaactcattaaatctttctttcaatccatataagccacctaaaggaataaaatacagaacattcaagatagcttctaaaatcactcgcctatcttttacaaaaaagtcaaaaggatctaaaaccagcgctcgatagtgtgaagcttttgcaaataaaacaacaaaaagcaaaaacagataaacactatatactaaatacaaataaacaatagatattttctttctggaaaactgaatataaaacaaccacacactgagagatagaaatgaaattagtgttaactcagtatactcaaaacgattcattgctcttactagtttaggataatgcatcaatgttgggaacgcaacccaatgaatgattccgtagctcgatacacaagatgccacaaaagttattatatatttcatcaaagttctcatgaaaatgtccgccttttaaaaaagtgatcagcaaaattgctgatcactatatctttttataattttaaagtttttccgctagtctcttaagataagatcgtaaatcatctttaatctctgcatgtttcaagccatattcaatatttgcttcgatcatgcccaacttatcccctacatcgtatcgcttacctttaaactcatgcgcaaatacacgttgcgtcttgttcaattcatcaatagcatctgttaactggatttcattacccgcccccggtttttgattttctaacacatcaaaaatttccggtttaagtagatagcgaccaataattgctaagtcactaggagcaactttaggagcaggcttttctacaaaatgactaacattgtatagaccttcagcgatttcttcacttggattaataatgccgtactttgatgtctcttcatgaggaactttcataactgctaatgtagaagctaatgttttatcgtagttattaatcaattgtttagtcaaaggtaccgaatcttccatgatgtcatccccaagcattactatgaagggttcatttcccacaaatgcttttgcttgcaagacggcatggcctaatcccaaaggtcgtttttgacggatgaaatgtagattaattcctgttgtttcttcaacaagtgccaacaactctttttttccttttgatgaaagatttgattctaactcaaaatttgagtcaaagtgatcctcaatcggacgtttgcccttaccagtgacaaccagaatatcctctattccagaagcaatagcctcttccacaataaattgaatcgttggcttgtcaacaattggtaacatctctttagcgattgctttagttgcaggtaaaaaacgagttcccaatcctgctgctggaataactgctttacgaacttttttcatttttaacatcctcaacaaaattttatttagaagaagctagatccttttttactgcttttagagcgacagcaataaccatatccatatcataatactgataattacctaatcttccaccaaagataacattatgacaatttctagcttctctagagtattttttaaatatatccgaatttttagtatcattaattgggtagtatgcttctttagatctattccattcttgagggaattcttttgtgacaatagtgtatccttcgtccgcattttgatcaaaatgtttccactccattatacgtgtgtacggtgtttctgaatctgtataatttattactgcacttccttgataattatcatctcttaaaatttccgtttcaaaccgaaccgaacgatattctaactcaccaaattgatactcaaaaaactgatcaatcattcctgtataaacaatccttggaaattcttttaaaaatatttctttatcttcaaaaaagtctgtattcaattggatgtcaattaactcggaatctaacattttttcaaatatagaagtatatccatcaactggtacaccttgataacgatggttgaaataattattatcaaaggtaaatctaaccggtaaccttctaatgataaaacttggtagttcggttgctttccttccccactgcttttcagtatatcctttaattagtttttgataaatatctgttcctatcaaagatattgcttgttcttctaaattttgaggatgtcctattattcccgcttctgctctttgtgtagcaatcttttcctgtgcttctttaggtgttttgactccccacatctgataaaaagtattcatattgaatgggagattatacagttcgcctttataatttgcgaccacttgattaatatatccattaaattctgtaaactgattcatgtactcccatatctctttattatccgtatgaaaaatatgggctccatattcatgtacgttaatcccatgcacctttcgggtatacatatttccaccaatgtggtctcgtttctcaatgattaagactttttttccggcttttgcagcttcatgagcccaaactgcaccgtaaggtccacagcctactattaaatagtcatatttttttttattgtatttcatgttttctccttttttttgtaatacacttagtatctttcatcttccaattattataaaatacataataataacataaaattagagaaaaattaatctcaaaaaaagtaaagtatgattcagaaaatccataaattacgaataccagaataaaacttaataaaacagtcttttttttctttataatttgaactgtcccaagataatagagtatgcataataaaatacaaattactattccatatttgagtaatatagacatataggcgttatcaagtatttttgttgtgcccccaataatttgctgcgccttttctgtagtaatcatttctagtttactaccaaaaagattaggtggagattcttgataaaaaatactcgctaacctaattctcccacttaaagctttatcaagaaatacccaaaaataactattgaaagaatagtttgcagaagcaatccagcttataacaaaagatatgggtaaagaaagtgacgttagaagacaaaaaactttattgctaaaaagtgaattagaaaaaaaatagactatatatccaattgttaaacttactaatgcatttcttgaacccgtgaaattccacaagcaaaaaaatgccaatataaacaaacataaatcaagtacaaatttcctttttccaaaaaggtataagtattgaaaaaaaatcaagaaaatcatagttcctaaaaagttaggatgagaaaaaccaaaagaatgcctaatgcttccatctcttaccagggtaaactctggaataagccttctaaaataaagtccaatcacaaaaaaacaagctagaactgaagcaaaaaaaattatttgcatacactttttcaaatcaaatcttgtcaaagctgtaagaaaaatcgttgtacttatccacgtaacatctctgataaaataaaattgcaaagttaaaaaaaagaataaagatatcaggaatattaattcactgtatttaaattttgagaataaaagagcaaaaaaacaacttgccataaataaaataaggtgtccattatatatcttcatgtacatcatttgatcattgagtttactatattttacaaagaacagaaaaatatgaacaaacaactgaacaaaaaagttcatattaacaattttatttaaaaagcctaccatagctatatctcctcaatactttttaatatcttaaaagcatttataatacttgatttttttataaataagtaacaaatataagcaagcgaatatcctaagaaagagagtcctactggaagaataatattaaatacaacaaaaattaacgttaaaaatagctcaataaaaatatcaattgccgtagattcattaaaatacttagaaacagaaaactctgaaaaatttgatctgaatattattacaatcaaaatactcaatattgctaacaaaacattattaaacatggtagaaaatgcggcaagaaggacacttagaattaaactcaatatatttatttttaaaattgttttttcttttcttagagtctttaaaaaagtatttgaaagcaaagaaacctttccttcataaataaaaagaggaaataatatacctaggtaaaatatactgtccgcgtaatttggtaaccaaatttggataaaaaattgtaagggataaaatacgattattagcccaaacgatatgggcaacaataaatttctcaaaccaaaaaaaatgatacgctgatttttactatttatacgtcttaaaatagggaataagactacgctaacagcgttaataaaagtcatcatcatgttagataaactcaatactaaagataccttactaaatgtatttattgaccatttggcttcaattgcaaaccttattacaccaattattaataaaccagcgacatacgaaagcattaactttataccgacgctaataaactgaattgatttttttatggtatctaataagttgattcttacttttaaaaaaacaatatctttcataaagtaacacagtaataaaacactgactaacttggaaaacaaatctaatataattactgtagcaaagctattggaaataaaaagtatatatgttaagcaaagtataaaaaatagaattctatccattcttgtatatttggcgtattctcgaatcctgtttgttgcttgtaaaataaatagtaaataaaccttaatgtttgtaataaaaatacatactatcgataccaaatatataaatcttctatcactctccgtaaagtttatgcctaagaagaaaagactagccataagtatgctaccaaaaaataaaacaattaattgcttcttcaaaacaattttatctaaattttcgtagtactctccaccaatatttaaataaataccgtctggaagaccaaaatgaaatatgctggcataagatatataaaataagtataattggtaatacccgtaatcagaaacccctaatttcctaggtaaaaccaacgttataataacggaaatcaataacgtgataaaattggcagaaaatgtatattttatattagaaattatttgtttcattatatactccgtttcacaactctaaaaaaaacagcaatttttgttttaactgatatttcttttgatttgataattttccaaaaattatcggcaacaaatccaatcaaactatcattgatttttttattacttgaaaatttcaagagtttatttacaataattatccttttatagaaaattgcattataaattttattatcattatccaaatctttttttaatgtcttttcaaatagatcaagtgattcccattcatcgaaatacttaattattgaacctttagagtttactatatttttcatagcgccaaaaggatttactcgataatagtacaatatttcagaagtaactgagaaatcatttatttcattgatatattgccctaaaaacaacaaatcttcaccaattttcaggtgtgaattgaacaataatttattatttttaataatatctagtataaatatcttattccacagagcagatcttgctcctttgctatttactaatatatccacaattaattcttgtttattagaaaaattttcgagttcagaattttttaaaatacgtccatcaacatctacataactataaccgcatattgcaagttgagtcctagattttattgaattaaacaaatttaacagataatgactgtctaaataatcatctgaatcaacaaaaacaatatattttgaacttgctaaagataatcccacgtttcttgcttctgagacgcctctattcgcagttgaaaccatatttatattttcatatgaattcacatattttttgcaaataagctcactagaatcagtagacccatcgtttattaaaaaaacattgaaatttttatatgattgatctatcaaactttttaagcatctatctaaatattgttcagcattatatactggtacaattacatcaattgagcacatatttacctctacatactagtttatctgtgataattttccgatttttgaatatatactgtcttcggtggtacatccttgttaacaatactcccagcggcaataacagccccttttcctattgtgactcctttaagaataacggagtttgctcctatccaaacttcgtcctcaataatgatagttttactaatatattttgacaaatcatttctataatcatggtcatgatctacgatcactacgttatttgcaaatttacaatttttaccaattactattttgtttattgatgtaatacttacattttgattaaagaagcaattttctccaatctctaaagttcctcgctgtatcactctcaaactaacaaaatttctaaaagtgcaatttccaccgataaaaatctttcctgaatctttacaaattattgatatattctttccaaaacggcaatatcctgaaaaatgtaatttaaacttatttcttattctgaaattatattccttaaacaaattgaatggattaatcatttttgtcctcttttaatatatctgaataaaatttttcataactatttactacatcatcaatcatataaccagaacttattaattgttgtttattagataacctgttgtgatttattttgattttttcaatcgaacttacccactgctggatatttgaaagtttcaaaaatgttacatttccggtgatatttacctcttttgttattgcatcagaaagcaccaatgacagtccagtggcttgagcctccacaccaactaaaggcagaccttcgtaaagagaggttaaaacgaacaaatcaaatgcggaataataagaattaacatcgttagtttcactaataaaatgaacattattctctaaatgattattctctacaaatttttttaaattttcttcttcaggtccttgcccaataattactagtgaaatatttttattattttgtactaatatcttgattatttttaataaaaatagttgatttttttgataagataatcttccaatatttccaatcaacactgtatcatcactgacatcaagattatttcttattcttattcgttcatttttattaaaatcaaatctgtttaaatcaacagcattataaaaaatcttaactttattggaataccaagtaggaaacatagcttccgcagctttcaaagaacacgccacctgataatcacttgtaaacagtaatagcggatttaaaatttttataataaaatttttaatagacacttttttttctagagagttatgcgagtgaatcacaatgaccggcttactttttgaaaaccttactcctagagaaacgaataaattaaacaaaaagcttcctgaatttatatgaacaatatcataatgatttttattaagaaaatcacaaattttcttactcacagaaattaatttgcctaattttttttttgttattttaaattcaaaaatttttccacccatatgttcaatttcttttcgtctcaaattgtaagtagtaaattcaggggttaaaaaatcaaatgtaaatttttttttatcaattttttcaaaaatgttaaataaaatcgatgatacgccaccaaattctttagaaccagaattaatttgtaaaatcttaacttgtctttccatactactccttatcaataataacaagagtttcatgcttattttggtcttcaatattagggatttccatataattaccataaatctgagttagatatgcatcgaaattttctggaccatttaataatctatcttcaaaactataagatgcaccattaccgtaaatctcttttttgcttaatatacttttaaatttgtaagatcccatgaagttcatataaatttcagacttgtcttcagaatataatttcaagcatttagttatggcatccattctttttctggaatctaaaaaagaaaaaatattagtatttttgccaataaaaattaatattttctcgataaagggtctatcttttttattcactttaaccaaagtatcaaaatttgataaattatataaagctctcagacatagcaatctaaatttatggatagaacaaagaaattcatttttgggaagaccatctaaaggaaatatatctacccaagcaggtacaattttctcatacattccagatttgtctagtagcttcaccgatttatcaatgactttcggtacataatatgggtattcaggatcaccttgatatgttttgatttcaaaattttctttcaactctgttttagctatagaaataaatttatcaaattcactccttggcatggcaatgtcagcgtcgtcgtcccacggaataaagccaccgtgtctaactgctccaagataagtcccaccacttatgtaatagattatcttatattcttcacaaattctaacaatttcatctaaaatagctaattcagctaattgaacttttctgagaccaccctccatattaatatgtctccttatctaaattataaaattttctgttcatttcattttctaatattctttttgacaagatagtcgatgatacatgtgtagtataatcaagaaactctaattttaccccattcttttcgagctctttctccgctttcaaatatctttctgatcctttgtaatcagaacctatgaacaccacatcaaattgatactttttaaaagcatcaactttatctagattgtgcatcaattttacatcatcaacatacttaatagcggaaactatttcaagtctttcttcttgatttatcaatggagatttatttttataactttcaactaagagatctgaattgacccctactattaatttgtcacacatcgatttagctcgttttaacagatttaagtgtccaacgtgaaacatatcaaaagttcctgccgtaaaacctgtagaatattttttcattattgaacgcctctcccaaatttattaacaacaaatttgcttccttttttaatccaattttgcttctctaagaatttatatggaagttcatcatacaggatttcattctgatcaatccacacatctaaaagtctctcggaaatgaagccaaaaactctagcttgatagtcatcatagtcactgatatctatctttttttctaactcaaaaagtatatcaaatagccaagaacagtaattatccaaaagttcttttttcataatcaacatattaaatctatgagattttttttctttcataactttatcaaatattcctatataattaggatatttattttgaataatgtttttgacttccatcaaatctttttcataatgattgtgcttataatgactccatgtattttcaatataataatttctttttttaggtaaaatggcgtcaactttatctagaatgtcttctaattcatttttagtaggaaataaatttttgttatactttgataaaaaagctcttctataatggacgagaccaattatatcagcatctaagtttttccaagcccaatatagtgctgttagttcacaataattcctattcttccgagcaatattttctccaacatcgtcgcggaaacaaacatcataaactagtgaatttttattttccccaactaaagtaggtacatacaaatcctgttctttaggcatatcgctcatcttatgtgtaactaccattatttttattctactcaaaactaatatgctccttcttttttaaacactttcactattgttaataaaataatttttatatcaaatagtatacttttattacttgcataactaatttctaaaaatactctctctggataaccaatattgcttctacctgatgtttgccaaacccctgttattccaggtttcatagatagaaaaactccgtcttttccgtttttagtatattcatttaattcttctaaaactatcggtctcggacctactaaactcatctcacctttaataacattgataaattgaggaatttcatcaatacttaattttctgataaaatgcccaagcttcgttattctcggatcttcatgaggttcaatcttatagccgtttttgatatacttttcatataatttcatatctttttttagaatctcatcagcattttctttcattgatcgaaatttatatatatagaagcattcaccgttttgacctattcttttctgtttaaaaagaattttccccttgttagcgccaaaatgataaggaatgaacaaaactacataacatattatcataataaacacaccaattaagccacctaaaatatccataacccttttaaaaaaagtataaaatgaatatgcattagtatcttctaaaacattattatggctttcatcttgttccattttttcctccccctaaaataacccgaactttttcttctttatttctataaaatctggaaaataaacttgatctccgtttatcaaatctttggtaacttgttgcagtgcagtaactttattctgtccaaaatctttcgcaatctgctcataggtttctttcatataaaaagttcgttttttaaccccgtgggcgtccgatgctaccatctgaactaaattgtgttcaaccatcatttttgctgttttttggatgtctttcccgaagatcccaacataactcggtgctgttaattgcgctaagcaacccatctctaaaaatggaatcagacgattaggatcttttctaaaaaaagcgttccgttctgggtgcacaattactggcgttttccctaaattttgtagctcaaaaaatatattttctgtaaaagaaggaacttccatggtaggaaattctatcaaaatatacatgtcatcaaggtccgtgaatagaatctcatcattacgaatattctcaatcaaatcacctgttatgcgaacttcttgtccttcaagtacagttaagggcagatttctctgatccagttcttcttgtagcaagaagacttgagaaatgacctcatttttcggattactatatttcccattattatgatggggtgtacacaaaatgtgcgtaattccttgactgattgccttttcagccattgcgatactatcttctaaagtttccgcaccatcatctactccaggtataatatggcaatgcaaatcgatcatttctctgaactcctttttagtcattaatttccataataataataatatcctgcatctttactgttttctgcaccattatagacaacacccaacattcttgcttgaaccatatttaagagctcttttgctttagttaaagactcttttcgcgagacattctcacgaaccactaatatagtaccatctgcttttgaggccatgatttgtgcatcagtcacggcaacaactgggggcatatcaaaaatcacgacatcatacaagttttttgcttcttcaatgacttgattcattcttgtcgaacctaataattcagaaggatttggcggtttcgggccactggtcatgacagacagattatcaataattgtcttttgagatgcctctaccacagtggttgaagtacttaaaactgtgcttaaaccagtattattttgtaggttaaacgttttataaaccgttggcttacgcatatccgcatccactaacaatacccgttgtcctgatttagcaaagactactgctagattggctgatgttgttgatttcccctctcccggtcctgaagaagttatgaccatcgtcttaatttgtcgatctgctgaagaagcaaattgaatgttggttcgaatcgtacgatattgttcggaaataggagaagatgggtcaaccagagtaatcaaactgaccgcatgtgtttttgttcctttacgttcttgttgttttgccatgtcttttcctcctacactttcgaacgactacggcgagattccgtcgttttttcattcgttggctttttcaaaattggtcttgttagtttcttttgaatagtcgcattcaattctttttgcgacatttgcggcacagtacctaaaatcgtaaaacctagattttccgttacaaacttatcgtctttcactgttcgatccaataattctaataagaaggcaattcctacaccaacaatcaatcccaatacaaggccaattgccaaattaatcttattgtttggcgatacaggagctgtacttgcttgagcatttgaaataattgaaattttatcaacattcaatacatctttggcattttcttggaatacaagtgcggtagtattggcaatgtttgctgcatagacagaacttgtatcagttgctttaattgaaaacatcagagagttttgagactgtgttacttcgatagcatctttcaattcaggtacagatttatcaatcccatactccgattcaagctgattcttcacttcattgattacaagatcacctgtaaccaattctttataggtattaatcatctgtaaattagtattgacatcattggcattggttgtttccgtttgaggcagcgtaacaatcaattgtgcttgtgagctgtattttggtgttaaaacaaaaaatgtaactactcctgctaatgctaaaccggcaaatagagaaagaaaaatcgccgctaaatgtttacgcaatatatcaaaaatttcttttaaactaatcgtttcttccatttcttctccactttcttctagttagctgtatctaactgttcttttaggatttgttgtactcgtttcaattcatctccactgactcgttgataagagataccgtcttgcataaatccgtccccttgcatttgcacttgctccacttttttgaaagcatcacgataatctaaggcaattttttgcatcataccaaaatccatatccgttttcatatttccttcaatagcagataggacttctttatattgtgacaccccatccagagaaagagctttttttgcaacagcagctacaacatttctctgccgaccttgacgtccataatcaccattcggatcatcataacgcatcctagtataggacaatgcttgatccccatttaaatgaattttaccgatgtcaaatgtattcccttcgttttcaaacttcaaatcattattaacatcaacgccgcctactgcatcaactaactctttaattccggccatattcatagcaacataatgatcaattggaatatccaaaaacttctgcacggtatccattgacatagctgctccaccaaaagcgtaggcatgattgattttatctgttgtgccatggccaacgatatctacatacgtatctcgtggcacactaacgatcgttgtctgtccatctgttggattaacagttgccaccataattgcgtcagaacgcccttgatctgtacgtcctaagtctcccgtatcaatccccagtagcaataccgagaatgagtctttcttatctaagtctaatggtttttcacgttttcctgcttcttgattttctcgctccactgattcataggtcttttggatcgaaccggatagatccatgtataacttggcgccgattcctaccacaccgatcacgagcactgcaacgattccaaaaataatcaaaaaaatcttttttccttttgacataattattcctccagttggctcttcctatcaataataggattctgaatctgtctctgaactatccgtcatactatctgaatagccatcaccagtcgttgccgtatctgttgtattaccgtaataaccagcatagcccatttgtgaagcaacggtttctgcaagcttggtatatttttctttcaagtctttattgcgaattttgctgatgctgtcaacggctgataagtagttctcgtaggtcactgcatccgtcactttatcgtctttcagcatacgatcaaattctttttgcagttttgtcacgcgatcaagttgagcatctgcaaaaccaaggtattctttcactaacgctgtccatttgtcatcctcaaaaaaattcaagttttcacgaatgctgccaacgtcagtctctttcagatcttttttgatgatgacgtcattttcggctttctgccagttggagacgcctttcgtgaagagcttatcggttgcttcttggattttttgctttgcttcgatatccttcaattcatcgtcaatggcttgtttctgcttttggatctcttttgcatctgccggcaatgcatcctcttcgatgccgtattcttcaccagatactttgatcatggacaactttccaacgagctggctgatatcatcagcggtgatgcccgcttttaagaatgttcgatcctcattgagataaaggcttgcgacctccttcttcaatgatgcaatactgtcggtctcactggcgatcgcagtttgcgcatattctacccgctgctggtattgtcgctgattgttctggcgatatccaaccaaacagatggcaacggatccaacaccgactgccacaacggtcaaagtcttaagtaacggctttcccatgaacacactccctaaattatttgtgctttataaatttatcttttcaatcaagaaaagcaaatttgctcaattctagttaattataagagaaaattgaaattaaataaaggtaatttatcaagtttttacatcattaagaacgaggtttttttaaaaactgtgatttaacttgaataaagcagcgatctcttttatataaaaaaacactaaaaactatatattttgttatttaatttctgacgatcaatttttccattaaaagaatttcattctctttttcatctttctgcaggcattcgttaaggtatatcccttgtaataaaactagcatcataaacagcgagaaaaatcacgattttgtttcttaaaggaatcttggatgtttgcaattatttttgagtcttttttcaatctagtaattaaataatttaaatagttgaaaaaaccattttttactcatttaattttctatttttaagtgctcgctttgatctgttctgataaactaaattatttttcaatattctattctttgaaatgggaaggtgtctgttctttttcatctggtttttttgccaataaatgactgcaaaagaatggtttattggcaattcatgtcaattttttcaccgtttgatgaaatacgtgatttgttattgcgattctaacttcattaagatagctatagacagattcaattctttaattggaaaatgaaaggagcaaaccagtgagagagcttcagatgaaattcgttacgaatactgcaacgatccgttggatgcgcattctcgacttatttgagttagagccgctttgctctactcgtgcactggcaaaggcttcctcaagtacaacgcgaacgattgtgactgatatcacagacatgaagtcccatttcaaggatgccctccatatcgattcgtcccacaagggctatattttcaccgtattgaacccggcgaagtacctcgcagcgaaacgagcactgattactgacgagattcttttccatattgtcgagagtatttttcagcatgaagaaatgcgttcttcagaatgggcagaaaggtatcatatctctgagagtacggttcttcgttacttgagaaaagtacaacctgttcttcgcgactaccacttgcagctggattataacccaatcacattcattggcgatgaaatggatatccgtaaattttttcatgatttttattatgaatcagaaatcacggcacacacgatcttcccccctattgtgattcacgacatcaccgtcaaagctttttctgactgccagcgaaccaacaagcaagcctgctcatttggagagctcaattattatttgtacataacccttgagcgctattgcgggggacacacagtgaaactaccaaaaaaaatcagcaaactgttttcaactaaagaagatttcaaagaatttgcggaaatcaatcagcatatctttgatcactaccaacaaagacttccccaagaagagattctctatctctttctgttggtttggagccggcgttcgattaatgacgttactggtgaggaagtcttctgccaaaaatacaatcagtgggcagaaatcactcagctggccagtgattttgtagctacctgtattcctgaaaccaaaaattcctcccgcgatcatatcttgatcgaatctttttttaccgtaacaaaaatcaaacagttgctctcccctttgttgaatcataatattgtcgatgtcaatctttacgcccagcgcttgtttcctgagtcttatcaaaaatgtcggaattttctcacagaaaatccattagctgttgctacttggaataaaaaaagtttatcccatttaagtgccagtctgacgatctatttggaatctatcaaatcgctttattggcataccaaaaaaaatgttgctttcttatttgaaggctcatatattctctgtcagtatttaaaaagcaaatcgatgcattacttgcatagctcaaaaaactttttctttcctgattcaaatgaattgtcacctgattatttaacgatgaatcacattgatctcgtggtaacaaattacacagaatatgtttccgattatgctaatgacattgattgtttgatttttaaaactttccctgacaaaaatgactggaataagctagccaaatgtctcaatcctcatatgaatgcttaagagcacttccgattatgacaggggaagtgctcttaagcgtcttttgcttccctaattataagacagcaacgcccctgagaacgtatcaatactcttttttctggttctttggtacagtttaggtgtattttaagtcgaatcaaatttgggaggatctttcatggagaaaatcattctgatcggaaatggggatgtaggttcgagttacagttttgcattagtcgctcaaggaattggcaatgaaattggtattattgatttagataaggcaaaagcagcgggtgacattcaggatttaaatcatggcttggcatatgttggtccaaaaacactatatgttgctgattatgaggattgtcgagatgcagatcttgtagtgatcaccgctggtgcagcacagctgccccatgaaacacgactggatttgacgaaaaagaatgctcagatcatgaaaagatcgtgaaatctgttattgctagcggttttcaagggatcttcttgattgctagtaatccagtagatgttttgactcactatgtcaaaaaaatcactgggtttcccgctcacaaagtgattggttctggaacttctctcgatagtgcgcgcttgcgtaatgcgattggcgagcagttgaccattgatccacgggatattcagatttacgtcttaggggaacatggtgacacccaatttccagtctggtcccatggcaatattggtggcttaagtgttcacgagtggttggaaaaacacccaagtttttcggagcaagatctcggcctgattgcagaaaaagtgaaaaatgccgcttatgacatcattgctgccaaaggttcgacacattatgggatagcaatctcgctggctaggatcacccgcagtattttaaaagatgaacatgcagttctgccggtttctgtacacttagagggacagtatcaagcaaccgatgtctgtattagttcccctgcaatcgtcaatagtcaaggcattcgcgaaattattgaaatgcctctcaatgagtccgagcaacaacaaatgtacgatttcatccaaacattgaaaacgatgcaggcacagttgcaggaatgaaacgagcttttctagatgatgcttttacccactaaataaaaaagcgtatcttgtccaccatcaatcatgaatgatggtaggattacaagatacgctttttcgtttattagtctagaatcgttacttttacttgacgtcggccccattgcagacatttggctacattatcaaagtggacatcaatgatatttcctttgatcgcgcctcctgtatctagcgctagcgccacgccatatccttcaacattcaccaaggtacctaatgggatcacacttggatcgactgcgaccgccattggattgctgcgaagatctgttccgctggcagtcaggtggctagcacctttctctgcataagaatatgcggttgattccatgatcattgtcttgccgctggaaggtgtgctgctacccgaattgttggagctgttattcgagttgtttgaactattattcgtcgaactgctgctcgtattgcttgaagctgaattgctgcttgaactgctgtttgattgcgcgctctcacttgaagatgacgactcttgacttgagctttcactcgctgcttttgccgctgccttcgcttctttttctttagcttcttgttcggccgcttctttggctgctctttctttggctgctttttcagcagctatccgagcttcttctgcttctttgctggaagcaatctttgctaaggtcgattcgttttctttcaactgtgtctgcaagttggcgatcttactatccaactcttgcgcctgtgcttccaaagaggattgatcctgctgtaaggattctttggtagactcggctttttcttgcagagactctaatttttctttttcagatgtcaacgagtcgattttttctttttctagattttggagcattgtcatggcgtaagcccggttgatgaaatcttggatattggaagattccaacaagactgtccaatctctagttactccaccgttgacctgaatgtctttcattcgttctgcaactacagcttcacgtttttcaatcgtttcttgagttgcctttatttcttctttggtttgtgccaacgtttcttcattgttagcgatttgtgcttttaatgcttcaacctcgctgtatttattattgacatcggtcaaagcgatttgtacttctgtactgatttgctgactttgctgcataacggcactttctttctctttcaatgattccagagattcagcctgcgcaaagatcggcgaaacgatacctgccgcaaagactgcgacgaccatggtacgtaatttctttgccttcaaaaaaattccctcacttctcactaaggtttccaacgcttattattatacaaattctgggggcaagatatattgcaactcttttacaatttattacaatttttagccaaagtgggagaaataagagtctattaaaaaataattcacgtgaaagtgggaaatcagagccttaaaaaggctttttttattgtaatacttttgtaatattactctctcttcttacgtaattcttccacaaaccgccttaagtcttgaacattggtaatctcattgatttgcagtttttgaaagttttttaaaagtcttcgctgatgaaaattcagcttcggtaacgtttcacgcaattgctgccaatcgattggcagttcagaaatacgttcctgccaattgtttttcttttgttccaaactttctgataaagtggctttctgctgttcaatagcacggtccagtcgttgaaccgttcgttgaaaagcagcaagattagccaatgtatagcccatatccaacgacatcgccatcaacaatccaacaggtagataaaaactgaatctttcagccaacatttggacaatgatcaacatttgcggatgaacaatgcggacgatcaagacacagcaaatgccccaaaagattgaaattgggacagccacgcgaccattgatattcaaaaaaacattgtggtaatcccaccatgaagcatgaaacagtttttctaataaaaagctcgtcacgtactctaataaggtcactaaaacagctgctgcaaaaaagagcagcagcaattggttatgtaacggtcgcagtaaatacaagacacctaaaattccaaagccataaataggagtgatcggtcctaccaaaaatcctcgataaacaaaatgtctggcttttatcgagcagtaaaccgtttcccacagccaccccacaaaagaatacaagaaaaacagcaaaacgatctgagtaaattcagtcatggaaatctctcctaacgaatggtaaataactatttttggaaaagcattataaaagagcaatataatagtagaaaacttttctttcttattccagtatacgcttcgtttgtcggtaaagaaaagatttgcgttaatctgatcgagtcatctgccctttccaaaaaggatcgagggatgtcctgtatctgttaaattgtaaccgcacaattcttttgtataggtgctatgatctagttcgatattctcgatgatttcttcctctgaaaaaccttggaaatcaaattcgctgatatagcttcgcaaaaggaccaatttggcatcgagtaagatgatttgttgtacacttgtccagaaatcttcctcagattcttcgcgaacaattctttctacttctgcttccgtcacttgccagtatctatggaccaatggcagacgttccttcatcactgcaaaatcaatattcccacgcatctttcgcaaatactctttgacatctggataaaacatccactcacctctgttttctagcatttccctgcttaggagactatcaatggataatcgacagctaacaaaaagttctgattgccaatgacagcacaagtgtacctttccgacaataatcatcctgagcagcgagggatgcattcactttttatatagcatagcaaatgatttgtgggttttataatcaatttttgcatcatgtaaggaaaaatgtgtacaatctcctatactatccagacttagccagcagataaacgaaacttgaatttttaaaattcgatagactactttcaatagtgctcatttagaaagattcttctattgccttatttacgagcttattataggataaataaaataatttttttaaaaaaactagaaggagtaaaaaaatgaaaaagcacatggttttaggtttagttgggtttgggttatttttagcaggatgtacagaaaaaccatcgggatcggttgattcttccacaaaagaaaaagagcgtacacaattttcttccactgtaggatcttctgaaacagccagcactggcacttcagaaaatgtgattcctgttgagaagcagacgatcactggtgtaagcggttattcctattcgctggaactgccgacaaattggcaaactgtagccgattttgagtcactaaatccagataatgattttatgctttctgattcgttacaaacaaaatttctggcggctgttgtggagtctaaacaagactttgcagatttcgacagttatcgtgcattggttcaagacagtttagcatcgaattttggtaccaacgcgacatttttaccggttcctggtactcaaacccaaatggttgattttgctgcaactgtagaagggttgaacatacattacttatattatgtaacagaaaccgataataattatgttcaattgtatggttggaccttagcaagtctttttgattcctcaaaagatgaactaacaaagatcatggatagtttccaagagctccctcaataaaggcatgaatgcagaacagccgttgctttaaactcaaacgaaagaaggagatcaacacaaaaattgtgcggtctccttccttcgtttggaaattttttacatccgattttttctcatatttcttttatctggcagctattcgagtattgccctcttgtgccttcatcattgtactttcatcttaatgtttctatctagtgcctattattagggtcatttgctgacgatcaatcgttgtcccacaaaaatcaatgagccgctgatattgttccattgcatcagctgattgattgagaccccatagctctgtgcaatcccccataaggtatctcctgattttacggtatatgtcttagaactagaggtactgctgacttctttcacataagcaccactgacccagcctttgccttccacccggtaccaggtactgttgccattaacactggttccttgtttttgggccactgccttgaaggtcgtattgttcgctaatgaccccactacactggcactggttgatggattggaacgaatattcagcgctgccgtggttttgaattgcttgttgatcgtttgttctgaattattgctgttattgttggatcctacttccgttacatacgcaccactgacccagcctttgccttccacccgataccaggtactattgccattaacactggttccttgtttttgggccactgctttgaaggtcgtattgttggctaatgaccctacgacactggcactggttgaagcatctgaacgaatattcagcgctgccgtggtcttgaattgcttgttgatggtttgctctgaattattgctgttattgttggatcctacttccgtcacatacgcagcgctgacccagcctttgccttccacccgataccaagtactgttgccattaacactggttccttgtttttgggccactgctttgaaggtcgtattattggctaatgaccccactacactggcactggttgaagcatctgaacgaatattcagcgctgccatggtcttgaattgcttattgatcgtttgttctgaattattggtgttgttgccattcccgctgccgccaccggtcgcggaatcaaattgtgtcaaattgtaggtttcgatcaaattattcagcttgccggcataagtcgtatctgtcgcataccttccttgaagccattgtgtggcatcacgataggaagaggtattggatttccaagccccactgtaaaaataaacgcctggtgaaaaagaagtcgtttttaagacatgggcattatcttcaaatgattcctttaaagacggatatttgcggaattttgcaacgatctcataaagattgccgttgccatcatcttccattgttcgcatctcaacatattgaccattgtatgaacctttgatcccaaacatattgtttgcttgcgtcgtaagtgtggattgtccccatcctgattcaaggatcgcttgtgctatcatgacggaggcataaagatcgttgacacttgctacttgttgcgccattggtcctacttgctggatgaaggcttgttgtgtattagatcttgccatcacacgatcgatattaggcataatctttgtttctaatgcaattcgctctgcctctgacaacattgggatctcacttgacgattctgcagaatcagcgtcactggcaggctccgttcctagaggttcttctgaagactcgctggttgctgactcacttgatgatactgtggaatctgtgtcctcagtcaacgatgtttcggttccagtatcctcggtggttgttgcttgactcgcttgtgattcatttactaaatcgtgtaaatcggctgtatcatccgacgaagctaccgtaggctgttcaaccacttgtacacccgtgtcattcgattcttcaacagaagttgcgagcacactaaccggtactaaattcagcgaactaacgagagcggtagtggtagctgctccttttcggtacaattgactgcgtttttgtcgttgcaactctttgcggatctgttttctgcttttcatttttctctccttctactagcgctgattcattctgcccattgggttcaatgagaatcagtccactggatcaagtgtttataaagataaaataattaattgactctaactgcaaagctcggagtgtagtatgctgtatcccccacagaaactgtctgtcctggacgaggggcatgaatgtactggttgcctcctaaagagatggctacatggtgggtactgccggcagcaccccagaacagtaagtcaccagcttgcgcttgactaacagaaatcattgtaccagcagtttcttgcggtactgtccagccaccgatatcttttccggttacttgtaaatagacataacgggtaaatcctgaacagtcaaaactatctggtccttttgctccccagacatacggcttattgagatgattgtaagcttctgctacgatcgcagctccaacgttcccaattggcgcagatggtgtcggaggtgcaggctcagagctaggagcaggctgaggagcaggatttctgctgctttccgtacttgctgccgtcgaagaagaatctggagtagttacggggcttgtttcattatttgttggtgtttcttggatatccccttgaacatcagtggattctccttgagcagaacgttcggtttcagaagaatcagcttcaaaaatcgaagaattttcagaagactcggtagtcgttggtatgagctgatcttcagctgctgcctgctgtcttgctgcgacccgctctgattcttctcttattcgagtttgttctgcctcataggcttctttttgagcgagcaatgcttccttttcactttctttatttgcttgccgtaaagcaaggtttgtctgcaagacattcagatctgcttgcttggacgccaactttctttttgggcttccagctggccttgcatttgctgcatttccgccattttggtttctgcttcatttttctttgtcttaacagctgcttggtccgcttgttgctgttggatcatctgattattggcattgacgatcgtcgtcattccgtggaaccgctgaacaaagtcaccgaaagattcggaatccaaaagcacggaaataaagcgatcacttttcccattgacttgagtgtctcgtgcttgattctggatcgctacttgtcgtttctcgatccgtgcttccaaatcagtcacttctttttctaaatcattgatttcattccctagttttttctggtgagcgattaattcagctgcttgttcattgatgtcagacacttcatttgttaactgatctatttgtgtctgcaccgattgatgctgttgtttcaattcagctacttcgttatttttttgctgaatcaattgatcgttatcatcggcgaacacggcggttgggatgacaggacttgtcagcgctattgcacaaatgcacaaagatgatgcaagtttctttttcatttccgcctccaattcgtcaattttgatcatcaaattacatttatttgacatttatcattttaacatactcctattcacaacccaattgatttcccgtttacattttcattacaagtgaaatcacttgttttttaattctcgatagtttcttaaaaaacactcaaccttccattatgatcacttttcgaaaagacatctaagttggtgagtttataaaatcaagcagtatctgtaagatacaaaccgttcttgatttcaaaaagattacaaagccgtagaaaaaaagccgtagaaaaaagccgtaacaaaagaattcactacaaaaaagtccagagatcgttcgatctcaatcgaacttgagaaaggctatttctccattttttgtattatcttctatcacagcttctaaaaacttttattggtacggcaacagtgttcgcatcacttgaatttgatgatcgatttgttcttcttgaatatgacccgtcaaagctaaaatacccagaccttctataacaaacatatagttttccgcgattgcttccagattccgatcggcaatcacgccttgcgcaactccaacttgaaaaatctcttggatcgtgcgtttcgtctcagtcaactgcgtttgctgcaacgaactcgtctcaattgacttatgcgtataataatactcatacgtcgctcgcagcatgctgtcggatatgctatgaagcaatcggtatttatgatcctcaaaatatttcgtcaagatagtctcgaaagaagcatttgctttgatcattgctcgaacttcattaaaccgtcgttgcgaacgttgttgcagcacttctaagaaaatcgcatccaccgattgaaagtacagatagatcccgccgcgactgatgccgcattcttcgatgatgtcttgcatcgtcgcatcgatcaatcctttcttgctgaatactactttggcactttccaaaatcgcttctcgtttttgccgttttttttcttcgatcggctttttcatgcttccacctcactttattaatgacacctgtgtcattttattgtataatcatcctaacataaaaatgacacgagtgtcattctataagaaagggtgttttctcatgaacacaaaaaacaaaacgtatcgtttagtgatccgtgcaattctaaccgcaatcattattttacaaacgatggtgcctttccttggctttattcctatcggcatcactagtctgacgatcattcatatcacggtcattgttgctgccattgttttaggaacgaaagatgggatgtttatcggcttggtttgggggattttcacgattattcgggcattcacttcccctacgacccctttggatatcacagtattcactaatccgatcatctcagtcctgccaagggtcttagtaggtctcgtcgctggtatattgtttacttggctctatcgtaaaacaaagaaagtcgtccttgcttctattgttgcagccatctttggtacccttaccaacacggttctcgtgttaacgttgatgggaaccctgtacactagtttggtgtccactacctatggtgttgatgcttccgctttgtttgtcacattaggagctattgcagtgactaacggcgtttctgaagtgatcacagcagtgatcctgacaccaatattagtcaaagcgcttttcgcagccaccagtttacgtccagaaaaccgctgagtaaaagtccgattcttttaggtttgtatcgttagctttatcctatcattttttacgacaagtgcaaacttgtcctctcatttaacaaatgaaatcaacaaaaaaacctctcactagcaacggttccatcatttaatggaacacgtaactgtgagaggtcattttgattatctttcaaaaatcagaaaaaagttgctatcaatgcaaggattgctaaaccgccttgtgtcaatataatttttttgtcactagtgatgctgccatacagagcaactaaaatgatataaatcaaaagcaggcgactcaattcgacaggagaagcggaaagaaacacgctatagagcaagccgatgccgattaacccattatagattccttgatttttgaacaatgtattcagtgaagggcgttctaattcttcttttgataaattgaaaacccgttgcgttctctttgaagtagtcgcaaaagtttccaaatacatgataaatagaaattcaagtgcaacgaacatgattaaacctatagtaatagtggacattttgcttcctccttttttaaatctggttttctttattataaagtaaaccaagcaatcttccgtccttcatgcttctagcgaacacaaagacaaacggaagaccacatagaaagtaagagtagatttatttaaatgtcgtgattttttctgcatccaaacgaatggattcatagcctaattcttcagctttaccaattgatagaatcataactggaacgtagcgttctggatcgacatcaaaagcctctgctaattggtctgcttcaaagccaccaattggattcgtttcgtagccatgggcacgcgcgactaacatcagctgcattgccgctaagctggcgtcaacttttacgatggaggtcatttgatctttcgtgaagctcttgtagtaaggaatgatcgtagccaattgttggtctctgacttctgccggcatttttcctgcttcaactgcttgattgtaaatttcttccccgtattcataacaagctaaatcaccaaaaatcaagatcatggctgccgatgtgtcgttttggcgtgtgttgaagcggatcagtggttttagttttgctttttgctcagcactttcaacaacaacgaaacgccatggttgcatgttaacagatgagggggcagtcgttgcttcttgaatcatcgttaacatttcctcatgagagattttgaccgtctcatcatagacacggacggattttcttccaaaagtgatagctgaaaaatcgttgtttactctattggttgacatattagtagcctctttcatctcattaatttattcaacaactgcaaaaacgcagctgcttcttcttcggtcagcgatagggcgaatgcttccttctcttggtgtttctcgcaagcagacagctcttgtttggctttaggtgttatttccacaaagacttcacgattgttgtctttgttcctttcccgcactacataattcttttgttctaaaatttttagatgtcttgtaactgctgcactatcgatcttcaattcagtctgtaagtcagattgcgaacaacgtccattttctttgatgaacatcattaattcatatcgggtcagactgaacccggtgcttttttcaaaagttgtcgtcaattcttgattggcaattttcaactgataaagcaggcggctgatttctcttagctgcatggaatactcctctctaacaattgactcatcaatcgttgactcgtcaataataactttttttcttgcttttgtaaataatttcctgcgatagacaaaaagcaaacaaaaaaaccaacatcatcgttggttttcttgctgtttttttcacttcaactgaaaggctttttttaatcccattacaaccagtgtggaaagactagccgctaagaaaatgattccccatgtgccaacttgcaatggtgaagtccctaataattcattcatgaaagggagataaacagctgacaactgcaatcccatcgaaaggatcagtgcgccgatcaacggtttattcttgaagaaagacttgtctaatccaaatccgctttgcttgcgaacattaaaaatatgcatcagttgtgcgatcgccataaaggtaaacgtagcggtctgggcataagctaattcatgatttgtttgtatcaaaaaactaaaaaaaccaaatgccgtcaatccgatcactatcccgcttaaaataattcgacctaagaatcgtttattgaccaaactgtcttctttggaacgaggctgacgtttcatcaggtcctcttctgcaggttcaaaggccaacgccatcgcaggagcgatatcgatcactagattcaagaacaaaatatgcagcggttgaatcggcatgggaagaagaaaaatgacacttagaaagattgtcacgatttcgaccatattacaagaaaaaaggaaagaaacgtattttttgatattgtcaaagatgattcttccttctttgattgcgtcgacgatcgtcccaaagcgatcatcagtcaagatcatatcagaagattccttagctacttccgtgccgcgaatgcccatcgcgatcccaatatcggcaccattaatagcaggagcgtcattcacgccatcaccggtcatcgacacgatctctccttcttcccgcagtgctttgactagttgaagtttattttccggcgaaacccgagcaaatacagccacttcttcgatccgttcattaaacgcttctttacctgccaaggcgtcgatctcttttcccgtcatcgtcttatcaaaatcgatcaaaccaatttcttgtgcgatcatggaggcagtttgcgggtgatcacctgtgatcattttgacacgaatccccgcttcttgagcgactttgacagcttctttaacatctgttcgtgggggatcaatgatgccaacaaaaccttggatctctaaattatccaatgattctgtcagctcagactccgacaaaccaccctgatagttactgatttgtgccaccgcaatcactcgttgcccattggaagctagtgtatgattgatgtcgttcaactgctctttcacagacggatcgacggcagctttctcgatcaaaacatccggtgcacctttcatgatcaacgttcgctgttctttttcatagacggtgatcataaatttgttttctgagtcaaaaggaagctcagcgattttttcaatgccttgatccatcagtgtttgacgatcgatgccttctttttttcctaatacaacaaacgctccatcggttggatctcctaggacctcaaactggccatccgtttctttcaaagaagcggacgtacatagtgcaccgttttcaatcatcgcttgaagtgctggctcttcattaactgagatttcttgtccttctttatggaagctccccgtcggttcgtacccattaccggtcacagtgtattgctctccattacttagaatgatctcagcgatcgtcatctgattttctgtcaatgtcccggttttatcactggcaatgatactcgtagcgcccaaagtctcaaccgctgagagggttttgactaatgctttgtgttcagccatgatccgcatgccgcgagaaagagtaatggttgagacagcgggcattgcttctggaatggctgctactgcaaggataatcgagatatgcagcatttctaccaaaggctgatccgttagaagacctgcaattaggaccgtcacggcggcaaagagtgccgcaataatgatagctttccctaatttatccagctcgatatccaaaggcgttttcgcgcttttgtttccagtcagcatatcgctgatttttccgacttccgttttcatcccggtggctgtaacgacggcatagccatttcctcttgtcactgctgttcctgcaaaaacaacattgcggcgatcacctaaagggacgtcttcatcatattgttctgccgcatttttttcgacagcttcggactcgcccgtcaatgcggactcaatacaggctaaattgcggctttccagcaaacgtgcatcggcagcgatcgcatcaccttctgccaaaacgagaatatcccctggaacgatcgcagcagattcgacttccatcacttgcccatcacgaatcacttttgcggtagtgtaaatcatttcctgaagggaatcaattgacttctgtgcacgcaactctgtcacaaaaccagtcatcacggcaattaccaccgcaatcaacacagcaattccttctatcgtttctcccatcgcaaaagagagcaatgcggcggctagtaataaataaacgatcagattatttaaattgtgccataacaatttccaaggggaggtcgattcttgttgctgaatcgtattttcaccataggtatctagcgcctcttttgcgccttgcttactaagccctttcgtctgatctgaatgaaagtattcaagtgtttctgtcggtgttcgctgataaaaattttccatctattctcctccttgtataagtatcttctatgtctatagctctgtttttatagtgagattttgtccatgacaaattatggcttcaagtaaagttgtgtcacttgtgcttggagtcagggcgtatgattgacaaaacggaaaaatcaagcaaggattgcttctttcgtatgttgtgagggtgtctgtaatcttgatcgaatgcgaatacagatgggaaaacgcttccacaagttttttacgagttgattggaacacagcaattgaaaatcattggttttagaaagggagatctgggtacttcgtaaaagggtgtctgcagaaaaggatgtttactttgtgaaaaaaaatatctttccatctttaagttatcatggattaaaagacaggtaaattattttgcttgaaaaatatcaatatcattaagataaagaacaaaatttatgtaaatttgaatttaaaataaagagaatcaagatttccgatttcttttcacaaataaatctgatagagcaatccctttccttgtgaaataaataaaaaataacaactttttttaataagaaatttctttcgctcgcgcttttccacctgaatttattcgttttaagtcaacccaattcaatccaagttaacccagaaaaagaagtgatcctcttgaagaaatcagcttgccgcaagtattcatttgaaatactacgaacgggtttgagagtagcagaagatcatttaaccccagatatttatcatctagaggaaaactaaccactgcttagtaaaaaaaccaattcctttgaggtcttcttcccctcatggaatcggtttttttacctgttcttgctgctgtctttctgtctctaagtaaatatatgtttttttcggagctaataccgtgcgaatttcttgttccaattgatcgatcacctcatagtcactcgaagttgctttaggagaaatcgtcaattcagcaacgatcagtaattcatctggacctaaatgcagagtacgcaggtcaatcacttcagctacttccctagatgataatacttgacgaatttttttcagatcacttttcgaagcactctctccgatcaataaactataaaattctttccctaaaaaaccagctacgatcactagaaggaccccaccaatgacgccccctaaagaatcaaagatggggttgttggtgattgctgtcaataaaatacccaccaatgcaatgctcacactgatcaatgcaaacaagtcttctgtaaagcctaaaaggatctcgctctctcggctttctttcaaaaaagcgatcaacggctgtttatccgtgttttgctctttgatttcttgccatccactttggactgctgaactttcaataaaaaaaccagcaaaaagaatggctgcaactagttggatgttctccacttcgtgggtaggatccaaaagatcctgacttgcctccatgattgccaacaggccgccaccgaaaaagaccgtcattgccacaaccgtactaaaaaaatacgtcgcgcgcccctcaccaaattggtaaagttcacttcggccgcgccgtgctcgtttttcgccgattgctagtaatccctgattgagacaatcaatgacactatgaatactttcattcatcaacaccgcactgccgctgaaaagaaatccaatgattttgaccactgctgcaataatatgcgtgactaagacaatccctcgtgcctgtcgtttttcttgatcggcctctttcattttctatgtctccgttctgtccacttttatcaagtgtttccttctgcttatttaagaatagcaccttccaatagaggaggaaaacaattgcgcttagcgctgacgagacccagaaatagaatttaacttttttaatacaaaaaaagagacaagtgagcgttgcattctccttcgaaagctggctacaagtgagaggattgcgacagtaactgtcattctctggcttgtcgttccgagtgaatcgcgttgcttttttgtctctggttgattctgtattcatttgttccatgcttgttcgtgccgagaggcaatggtggtcaagcattggtgatgggcatcgtcgccgctagtcgatatatttttctaaatgatgaatcaactgtgtggcttgctctttagatggcgagagaatcaataatacatcaaagccagccatcgtggcaacaatcccttcaagatccatttcatctagataattcgcaataacatctgccccattgctgacagtatggatcactgtgatgaactccacttgttcaattgatttcaagtattcattcatcgatagcttcagcttttcggtcacatctgcttccgccgtagcaatcatcgtatacttcgttttgccttctttcgtataagtttttgcgatattcaactcccgcatatctcttgaaatggtcgcttgtgtggaacacacgccttgttcgttcaataagcgcatcaattcttcttgtgtctctacttcttggttgaggatcaaacgcttgataatcgcttgtcgctggtttttcttcaaaatgatcacctgcttctactctatccattatctgcggatacgtcatgtatccgcattcaaaaaattatcactgatggacactcgagtcatttaaaagtaagcgagatcgatcatccgtaaatcagctgcttgccacagtagttgtttggaaaatcgatcccaccctttaatgattgtcgtcacagtgcttttattattcatctaattggaaaaacgcatcatcgataaatatcaattctttatattggtaggaaatttttttctgattgatcaattgtttcagcacttgactaaccgtttctctcgtcgtaccgctgaatttcgcaagatcgttgatcatgatcggataaggaatataccaagactcatctagctttccatgctttttcataaggatcgctagtgtattgatgacacgatcatgggcactggaagtaatacagtattgcattctggtcacttgctgttccagtactcgaccttgtttcttaacgatcattttcaataattctcgatccgctaccatcaattgttccaaaacagcagttgccacatacgcgacttcgatctctgtcaccgcaatggcagaaaagtcataacacgctgcttcaaaaaggccatttaccggaaacagttcaccttcactgatgaaatccgtataaaagaaagaatcggtttgatcatttttttcgatacgaatcagtccgctacatagaacaaaaatacgatcacgcaaatctccatcgttgaatagaatctgccctttaggaaaggttcggtaatacatattttcttccaatcgttccctgttttcttgcgtcagcacttttagacaatcaaaattgtcttttacgtattctcgcatgtttccactaatatccatcactccaatactttgtttgccagttaatcagaaatgatacgagtccctgtttcgtgatcaaaatcagctagatcttctaacgaggtaatgatcgcaacattgtttttgctaacctgcacaaaatccatcgctgcttgaacttttggcaacatacttcctggcgcaaagtgaccttcctggatgtattgttccagttctgtcaaattgacttggtctaaccattgctcattgtcttttccatagtttaaggcaattttagagacacctgtcaaaataatcaactcttctgcctccaagacctctgccagtttctctgaagcaaaatctttgtcgatcacggcttcgactccttgtcctgattcagtaacgggtatccctccgccacctgcacaaatgacaataaaatcgttgtcgaccaatgcacgaatgctggcttggtcatggattgtgatcggtttcgggctggcaacgactttgcgccaaccgcgaccggcatcttctttaaagatcgcattggtttctgtcatcatctgctgggcttgctcttcagtcaagaaaggtcctactggttttgtcggatcggcaaatgctggatccttttcactgactactacttgagtgaccagcgttgctacctttgttggtaagccttctgctgctaattcttcttctaatgcattctgcaaccaataaccgatacttccctgagtcatagccacacaggtatctaatggcatcgcaggatttttgggagagtttgctgcttgttgctgtaataagagattcccaacttgcggtccatttccatgggtgatcactacttggatctcttgtttgatcaaagatactaaatgtttggctgtttgtctaagcgcctgttgctgccctcttgcgctaggatcatcggtcaagatcgcatttccacctaatgcgatgactactgttcttttattcgtcatggtatccctcgtcctctcacactcttggaataaatagatttcctaaagtagcggccatgattgctttgatcgaatgcatccgattttcagcctcttcaaattgacggccatatttgctgcggaagacttcatcagtgatctccatttctttgatcccgaattcttcttcgattttctttccgtagacagtattcgtatcatggaaggcaggcaagcaatgtaaaacaatcaagcggtcgtctggtgtacctgtcgctttgatcaaatccatattgatttgatagtcttttagcaaattgacccgttcggtgaacttgtcttcttcacccattgatacccacacgtccgtataaaggacattcgcaccacgaacaccttcagcagtgtcatctgtgatcatcaattggctgccagattctttggcaaattcattggcataacgaacgacgtcgtcttctgggaataaggatttaggtgcgcagattcgaacattgaccccaagaatcgcaccagtaactaacaagctattcgccatattgttacggccatctcccacatacaccaacgtgatgtctttcaacgtgccaaagttctctttgattgtcatgaaatcagcgatcatttgggttggatgccattcatctgttaatccgttccatacaggaacaccagaatacttcgctaaatcttcgacgacttgctggctgaagccgcggaattcgattccgtcaaacatactgcctaacactttagcggtgtcttctacagattcttttttacctagctgaatgtcattggcgcccaagaattctgggtgagcacctagatcgatggcagctgtcgtaaaggccgcccgtgtccgagtcgatgttttttcaaagagcaaggcaatattttttccttctaaatagcggtgcgggatattttttttcttgagtccttttaagtgaatcgaaaagtcaatcagatactcgatttcttctttcgtaaaatctttttctgctaataaacttcttccttgaaatacttgttccattattcattcctcctatgataccgttagtctttatttttgtaaatttcaggttgctcaaagatcttctctgataaatggcatgctcatacaacgagggccgccacgtccgcgaacgagttcacttcctgggatgtaattaagtttgacccctgcttcgactagtttttcattcgtaatcaagttccggtcatagacgactacttctcctggtgcaatcgtcaacgtgttcgaaccatcattccattgttctctggcagctgctgtgatatctccacctccgcaacgaatgagttccactgcatctaaatcaagatagcggcaaagaatccgttccaatgtttctttttcttcatagatcttgatttggtcattttgtttggagatggaataaaccgttaactcgccttcgatttccggatggatagtgaacttgtcataatccaccattgtaaagaccgtatccaaatgcatgaatttacgctcttcaccgatattgaaagctagcacatgttcaaaagtcggttctttctcaaataattttttcgccaatttttcaattgaagcgacatctgtacgttgtgaaatcccaacagctaacacttttgatgacaagactaattcatcgccaccttcgattcgtgtggattcatcccgattgtataaaagatgctcggcttcttttttgaaaattggatgatagttaaagatatacttgccgtacaatgtttctcttcgtctcgtttctgaatacattcggttcaaggaaacactatttccgatcgtagcaaatggatcgcgggtaaagtacaagttcggcattggatcgatcagaaacggatactgatcgtctacaagatcggtcagattctgatggccagcgatcttcatttcattttttctcaatcctgccatcgttcggtcgatcagttcacgattatcagagatcgatagtaaatattcttcaatcactttgcgggtgttttcactttggatgtttgcttcctgcaagtactctgcaacaaattgttccttgagtcctgtagaggtcaaagattcagctgctaaatcttccaaataaagcacatcaacccctttatttcgcaatgtttcggcaaagaaatcatgttctttttgcgcttgctgtaaaaaaggaatatcatcaaacagcaattgttccaaataatccggcattaaattttccaattcttttcctggacgatgaagcatcacttgttttaatcgtccaatctctgaaaaaacgtgaataggttcattcattttttcatcctcctcattcctatacaatttgtttcccgttttctatgaaactttttttaaatagtctgagagtaatctcaaaccagtttctagcgtctctttcttacagcaataacctaagcgggcgtgccctggtaccccaaaagctgttcccggaacaagcaagaccccagtttcttctaatagatccacacagaattgatagtcctcttgttggatcttcaacttgataaatgccgtagaaacataatggggaacgattaattccactttcggttcttggtctacccactgcttgacgatggcaagattctctgcgacgattttcttgtttcgtgcgataatctgctctttgttttccaatacttgaatcgctatttcatcagcgataacaccgccacaaatcatcgtataatctcggtatttacgaaaatgttccgtgagttcttcactagcggcagtccaaccgatacgaatacctggcgttgagtaggtttttgacaaagagttggtagcaattcccttctcatagcaatcgacgatggaacaaaatgtgccttcttctgttaatggtgcatagacttcgtctactaaaatgtaggcatccgcttctttagcgatggcgacaatctgctgtaattgctcttgatcaaatagcgtaccggtggggttattcgcgttatttaagcagatcaattttgtttcaggtttcactttggctttcaaaactgctagatcaagctgccagtttgcttgatttaattcaacaaagtctacttctgccccaaatgcttttggcaaatcatagagttgctgatacgttggccgcatggagacaacatgatccccgctttcgatcaaagcgaatagtgccaggaaatttgctcctgtagctccgtttgtctgtaaaatattcgctggtgtcatgtgttggtataatgaagcgacgagttctttgaatcgatccgatccttcgatccagccataatctaaaggctgctgcgcgacacgtttcaaaaaatctgtactcgttttgccactgaaggccatgatttcctctagcgtcagtgcttcgatagaactttgggcaatgtcataggttgcttttttctcccagatattcaaccattcctcgacaccaaaattagcaatatccataatcaacccccttatactgagatcattccagtagcgattgctacgatcgacaatactgctgctaaactgaccacagccatgaccattttttgcctattgctgatttgatagttgttctctttacatgcccgtaagtagaaatagaatcctggtaaataggcgatgctgcataagagaacataggcaaagcctgctaatgtgatcccaatgatctgaaaggccgttgcgactgcaccaataaacaattgtttattgtctttttgctgataggaataaatcatttgatagatccccacgagcaagtaacaaatcaaaatcgctgcggtacacattgaataagcaaattgatacgcgtaatcggtcacaaggaacgttaacaagaacacgttcgtcaatgcagcagtgataaacaatgaataacttggtgcttgttttcgattgaccttgccccaactttttggcagcatcccatcgcgggacatcaataaggttgtttctactggtaacatcgtccatgacagccagcaaccaatgatggaaatgatcagaccgatattgataaaggctgcaccccactctccaaccatatagcgcaaaatgttggccattgctggttgtggtaacgccatcaattcagcttgcgacatgacgccgtatggcaataaggaagctagcacatagatgactagcaaggaaagcaaaccgatgactgatgctttttgggcatccgaccgtttttccgcacgattggctaaaacacttgccccttcaatcccaacaaagacccacatcatcaccattagacaacctttgatctgtgaccagagactgacagaagcaccactttgtagtgagctgctgacatttccccagaaatctgctgagaaaatatcgacatgaaaactaaccagtgcgataaccataaataaaaacaaaggaactaatttacagatcgtaacaattgtgttgataaatgaagcgctctcaattccgttattcaccagaaaggtcaatacccaaataaaaacacttgctagtaagattgacggaatgttttgtcctcccttgaatgcgggtataaattcaccaattgcactcatgagcattgtcgcaaaggcgacgtttcccagccaggcagagagccaatagccccagccactgataaaacctcctaatttcccaaatgccgcttctgcatacccaaaaataccgccgtctaaatctggtcgtttggcgcctaaattattcaatgataaaactaatgcaagaatgccaattccgacgatgatccaggcgatgattgcaggtccaggagcagcggacatcgctaagtcattcgtgataccgaagattccactaccaatggatgaactgactactaaggcaatcaagccgattttactgattcctcttttcttttccattgttctccaactttctttagtattgtgtagtaacttgcataaatcccacttgcaaaaaaaatcacaaaaagcattaaaaccaatctagctaaatgaaatactctatcgcctctttccttttatttattgattttttcagctgaaatcaatcactcttcttcctgataaataacaattatttatcaggtacatgtatatgataacgagttaaaaacgcttacattgtagttcagttatcatttccaatgccaaaaaattggcattattcattcgtaatgaataatcgcttttatcctctttttttacccatttttttctcctctagctcataatcattcagatatttttttctaagaatttcattagaaaaattgaatagtgtctattttttgaagaaaatcaatcaatttcgagcgaaagaaaaaagcagcacactactcaaacattcatgcatttaatgtatacggccccttacaagcgctcttacggggacaaaaaaaagaaacgccgcagcgtttctttttttattatttcctattataaaagaacattacttcattaatagttggtacttgtctccgtagtcgtcccttgattttctggtgtcatttcatctgatgtacccaatgcttttagcatatcattacggatctcattataggagtaatcttgaatataaacgattgattggccatcataagattcaccatcataccattcataagtatgtttatcgatagtaaaaccagaaagcatattcccagctagtgaaaccaagtcttcaaacttaaagttggtattgacattgtcactgacagagtcaagaatctcctgatattttgtgacattattgattttcaatgcttgactaatggctgcttcaatgacttcttgctgccgattgccacggtccacgtcagtatccattttacggattcgagcaaaaatcaatgcttgctctccattcaacgactgtcggccctttggaatcagtgttttaccagaattgtccgaagtatacttttcattaatgtcataaggaacatctacggtaacaccgccgattgcatcaatgatcttctcaaaacttgtaaaattgatattgacataataatcaattggcaagttcaaatagttttgcaccgtttcaatcgttgcatcttcctcaccaatcgcaaatgcactattgatttttgccgtgttgacgaccgtcccgtttccggtaccatcgtagatatttgtccaaatatctcgaggtaaactcaccatgtcgatctttttattttcgccatcatagaccatatagatcaaactgtctgctcgagtcgtatccagatgctctttcttttctcgttcggcatcattgtcgacccccattaacaggatcccaaatttagaatcaacatttgctgatttcaatgaattgtctttttctttattggatttgatcacagcggattctttaaacattttatccacagaattttttgcagcataatacgtatatcctgcaaataaaaagactcctgcaatcgcaaaaagtacgacgcctcctatgattcggcgcttattacgagctttgcgggcccgctgtttgctaaatttcgactttctatccatagtgcctccttcatgtttcctacttcactctccccgattgtaccagattttgttttcggcgcctatttttttaagatattttatatttttgctgtgaatttttatgctaatgcaaatttgttcgaaaaaattttcctatgatttttccttgaaaaaatctaaaaagatcatagccaagtaaagtatcatacgcagtatttatcgtataattatcaaaaaacttgaaaactaattgtttgtttctgaaataaaaatgaaactttcttttctttcttgattgctccccctcagtttggaactatggtaagatatgctagaaacgaaagattttttattcgtaaattcacagtggagaattcctctcctgacgcattttttctttcattgactattttatttttacaggaggtttttatgattggattattacgctatgccaaagactatcgtaagcagatcgtcttaggtcctttttttaagtttttagaagctgtgtttgaactggttttgccactccaaatggctgcactcgtggaccagggaattcgccaaaacaattggtcgaaagtagttgaaatgaccctctggatgattgcgatgtccgtcatcgggatgatctgtgcggtcatctgtcaatactatgcagccactgcttctcaaggttttggcacggaattacgtaatacattaatgaaaaaaatcaatttgttgtcccacaatgaattgaatctatttggaacagatacgttgatcactcgaatgaccaatgatatcaaccaaatgcaagttgcattggctatgttgatccgtttagtcgtcagagcaccttttttgagtattggttcagtgatcatggcgtttgtcatcgattggcaagcgggcttgattttcttatgtgtgctgccacttttttgtatcattttattttggatcattagcaagacagtgccattatataagaaagtccagatccgcttggacgaactaaatgaactagtcagccaaaatttgagcggtattcgcgtgattcgtgcttttgctcgatcaaaaactgagaccaaacgttttgaccaagccacagatgatttgaccaatgtctatattcgtgtgaccaatctttctgcattattgaccccggctacaaccatgattatgaacttaggaattattgcactcttttactttggcggtttcaaagtgaacatcggaaacttggaacagggggaagtactggcgttggtcaattatatgaaccaaatgctgttggcactgatcgttgtatcgaatctcgtcatcatttttactcgcgctgctgcttcggcttcacggatcaatgaagttcttgatacagaaccgtcgattgatgatagtttatctgaggtttttatggatcaacaaaaacaggcaggtgcccttcgtttcgaacatgtggactttcgcttttcacctaactatggcttagcattaaaaaatatcgattttgagattgctcctggcacaaccttgggcatcactggtccaactggcagtgggaaatcgacattaacgcaactgatcccgcgtttttatgacacagctgctggtaaagtgatcgttgatggacaggatgtacgcaagtggccgctgaaacaattaagacaaaaaattgccatggttcctcaaacggctgttctgttcactggtacgattcgtgaaaacttacaatggggaaaaaaagatgcgacagacgaggaatgctggcaagcattagagatcgcccaaagtcgcgacttcgtcgaagcactaccgcaaaagttggatacgccgatttttgaaggaggcaagaacttttctggtgggcaaaaacaacgcttaacgattgctcgagcaattattgctaaacctgatatattgattttggatgattcattaagtgcgctagattaccaaacagatctggatctgcggatggctttaaaagaaaaaattcgcggaacgattatcatcatttctcagcgtgttcgttcgattcaagacgcacagcagatcttagtgttagatcagggaaatctagtcgccaaaggcacccatgacgagttgatgatcacttccaaagcttatcaagaaattgtggcatctcaagaggaggaagaagaatgaaaaagaaatcatttgattggtctgccttccgccgctacctcccctatctcgctgtgtatgccaaagaaacttggactgctgtcgttttagggatcgctgctggcatctcaacggtttttatgacttatgaaataggtcaggctgtcgataaaatgattggtcctagcaaggttcatttcgaagaactttatcgcattctcgcgttgtttggcggtgtagtgatcgttactgttgtcagtcaatggctgatccaacgattagggaatcgagtggcctatctgtctgtcgctgatctgcgcaaagaaggttttgctcatttaaatacactacccttacgttattacgatcaaacgtctcacgggaatatcgtcagtcgttttaccaatgacatggataatatctcaattgcggttgctgctgtcttcaaccaattattctccggtatctctgtcgtgctgattgccttggtagttatggttaagatgagtgtgccactgactctcgtcgttcttgtttcaacaccgatcatctttttagtcaattggatcgtggcacgaacatcacaagcagattttgcgcgtcaacaagagatcgtcggtgaaatttctggattcgttaccgaaatgatcggcaatcaaaaaattgtcaaagcatttgaacgagaagcaatcaaccaagaacagtttgaaatgatcaatgacgaattaaaccttcgtggccgaaaagcacagttttcttcctcgttgaccaatccgctttcccgttttgttgaccatctttcctatctgtctgtcggcttcgtcggtggtttattgtacttttcaggctcggggctggtaacagttgggatgatttcaagctttacgatctattctagccaattttcaaaaccatttattgaactgtcaggcatcaccactcagattcagactgcattagctggtttggcacgaaccttccagttattggatcaagtgccagaaagtgcggatgacacagcaacacaagcgatgaaggaaatcaaaggtaaaatcgactttgaaaatgtggcttttgcttatgatccaggacaaaaactgatcgaaaacttttcttttacagctgaaccaggtgaaacggtggcaattgtcggaaagactggtgccggtaaatcgacactagtcaatttgctgatgcgtttctacgatgttgatcagggaactatccgagtagacggcgtcgatattcgtcaattgcagcgaacagcgttacgaaagagttttggtatggtccttcaagacacgtggctgttcgatgcttctttaagagagaatctccaatatggcaatgacacggctaccgatgaagaaatatacgatgctttaaaaaatgcatatatgtatgaatacgttatgcggttaccagataaattggatacgccgattgggcaacaaggtatcaagatttccgatgggcagcggcaattactgaccattgctcgtactatgatcagtaatcccccgatgctgatcctcgatgaagccaccagttcagtcgatacactgacagaaaagaaaattcaggatgcctttttgaaaatgatggaaggaaaaaccagtttcgtcattgcccaccgcttatcaacgatccgtgcggctgataaaattttggttatggatgccggacaaatcgtcgaacaaggtactcatgaagaattgttagcggaaaaagggtattattaccgtctctaccatgctcaatttcaacattaacagtcacatgttgatagattaacgctaaaagaagtggttccctaaaagaaccacttcttttttttaaaattgagaattgttatttactccaaacatcgctatattccggtttacgttcaaactctttttttgcaaatggacagagtggaatgattgttttcttttctgcgcgcgctttttctaccccttttgccactaacttttctgccagtccttgaccacgataggctggatcgacaaatgtatgatcaataatcattcgttttgttcctgcattcgaccaagtcatttcgccgatctctttctcgccgtctaataaggcaaaacgatttttttcttccttgatttccattagttttctcccctttgaataaattttaatgcgccgcttggacaagattggttcacttgagcaacttgttctttttgagcattatcgggaatgacccacggtcgacgtcctacctcaaaaacagttggattacctcaaacacacttcccactgtgaatacaaatgtctttgtgagaataaacatcgaatgctgagccatgatatttgcgatacccatcagcaagcaactgttcctctgcgtgttcttttaagtgctctgtcgttgttttccctccgtcactgcttgacttttattgaccgccttcatcataagctaaatcaacaaaaaaataaaacaatcgccatttatacgtaaaagatttagcagaaaaaacaactctactagaaaaaactgaaacataagcacttcaacaaacaaacgatccgaagacacatcgaatcctctctacaatccgatcctcgtccctagtcacagagaaaagaattttttctcatgtctagtttggatcatttcgtctgcttttgcttctgttacagctctattcgtttgatttcatttgatagtgattactgaaaagaaccttagtcattgttgatcgctgttagatgaaccatttgtgttgcatagtcgccggataaagcaggatcaatatagaaaccgatctgcatcaattcatcgccgccgattttatatccccccatttgatacactgtatctgccgctaatcccgccaatttgagagtgattagcggtgcagatgcttcggctaatacacggaaatagaaaacaattgcttcttgtttatcttcagaaacgtacatccatgcagtatcatttcctgcaaaaggactcaacaagcgaataaacgtgccatattggaagagttgtcgatgttttttataaaaggcaacttgctctttgatggctgctttttcttcatcggtcactgtcgtcaaatccagctcatagcccaagacaccagacattgcaacgtttccgcggatcgctaagtcagtgatccgctgtgtttgatggttaggcactgctgaaacatgcgaacccatgctagaagccgggtatgacaggctggttccatattggattttcaaacgggctatcgcatcggtattatcactcgtccatatctgcggcatgtaatacaagaaacctgcatcaaaacgaccacccccgccagaacatccttcaaacaaaatagtgggatgagcagctgtcaatcgttctaaaaagtcatacagacctaaaatatagcgatggaacacctccccttgctgggtaggatctaacaataatgaatagacatccgtcatgttgcgattcatgtcccacttaatataatcaacgggcacttcgttaaatagaagggctaactgatcaaaaatatgtttccgaacatcttctctagaaaagtccaatacaaactgactgcgacttaatgcgggagaacgtccaggtacttttaaggcccactcggggtgctgacgatacaattcgctcgcttctgagatcatttccggctctaaccagagaccgaatttcaaacccttctgatggactttttccgcaaaccctcgcagaccagaagctaactttccttcattctcataccagtcacccagagaagtcaaatcattttctcgtgcaccaaaccaaccgtcatccaaaacaaacaattcaattcccaatgccttcgcttcatcgacgatctgctccagtttttcttcatcgaaatcaaaataagtggcttcccagttattgatcaacgtcggacgttcagtcagctgatactgtccacgaataagatgactattataaaagcgatgataggtttgtgacatttggttgagcccttgattactataaactgtaaccacttctggtgattggaagctttcctgaggtggtactgtccaggcaaatcgataactactgatgcccatgatgagccgcgtttgatcataaggatctttttcgataatcgtttcgtgattgccgctatacagtaaactaacgccataacattctcccgagaattctgttgtagcgggatctgccaaaataacaaaaggattctgttgatggctgctggaacctcgcttgctgtccaatttcttgatacctgtctgaactggttctcgactgatttgccgttctttcgcccatgcaccattcaattggatcaaatcaagcggccggttgggaaaatccagtgattgactggctagttgatggataacgattggttcaagaccgtcattttttaaggcacttgaacgaatgattgctgatgtatcagtaaaaatactataattcaaaaccaattcaagcgcggcaacttcatctcgcaatatgatttgcaacgtttcgatttcttgcggagcaccgtgagtttgaggcaaccccgcaagtgctggtttgccttgactgatttcatggctttgatagataaaatgcgcaacatgactgccatttggcagttggatatcatatgccgcttcacgaaaatcaccgaacccattcccaggaaattccatcatcagcgtatccagcgagaataagcgatccttgctgcctgctggattcggcgaaaaagaacgatctaatcgcgggtaacgataatggccagaataatgggtaattttctttccaaagtagatatgcgctaaatttccaccttcttcgatctgcatcacataactgattttgttgttgcttaaatgaaaaatttggttttttttatcaaaatggatcatttcatttcctcgttttctcttttctttacttcacagaacctaacatgccttgtacgaattgtttttgtaatacgaaaaagataatcgctgttggcaaagtggcgatcacgatcccgcacatcatcatgccgtaatccggtgtataggaagcccccatcgcagataaaaccaacggaactgtccgtttatccggtgattgcaaggcaactaatggccacaggtagttgttccagctattcataaaggtaatgatcgctgctgctgcatacgtatttttagcagtaggcatatagactcggaagaaaatacttaactcattcagcccatcaatgcgagctgcttctactaattctttagggaaagctttgatattttggcggaaaaagaaaatcaggaacgctgtacaaacagaaggtaaaatgaccactgcaaaagtattgattccgattggggttccgctaagctgactaaacatgcggtataacggaatcatcaaagccgcaaaaggaaccatcatcgataagagtaaaatattgaaaatgcgatcttttgttttggttcgatagatctcaaacccatagcccgccatggaagaaaacagcaacgcgaagacggtcgtaatgaccgcgatcacggcagagttgcccaaagcacgagtaaagttcagttcagaagcaaataaattttggaaattgatcaccagctgatcaccgatcatgatttttcctgccacgatgtcaaaggtttgattggtcattcccaataccatccagacaaagggaaagacggaaataaaggccaaaagacctaagaaaagatactttaagcttaaagagagtgttttcaattttctttccctcctaattttgtttggatgacggataagaccacaatagcgatcacgatcacaaaggatactgccgccgcatagccaaagttcggggtgaatttataacttaaattataaatgtactgcgagagcgtggtggttgcattggcaggtcccccacctgtaatattttgtacttcgtcaaataattgcaacgttccgatcgttgaagtaattgtcgtgaataaaatgattggccgcaaattaggaatagttatcttgaaaagttgatcccatttagtcgcaccatcaatttcagcagcttcatagatgctaggatcaatgttttgcataccagaaataaagaaaatcatattatagcctgtccagcgccaagtaatggcaaaaataatcaagacttttgcccagaaaggatccgttagccattgaatcggcacctcaatcaaatgaatttgcattaaaaaattattgactaacccattcgctgagaataaacttttcatgatcaacgagtaagagaccaatgaagtgatacaaggtaaaaacaaggccgttcggaaaagacctttgaattttaattttttgtcatttagtatgttcgagacgatcaaagccaaaaacagcatgatcggtacttggatcaataagtataaaaatgtattaccaaaagctttcttaaaggttgagtcactcagcatccgctgatagtttcccaaaccgttgaatgacatcgttgtcggcggtcccgactggaaagacgtaaaaagagctgaaatcataggaacaaatactaatagtgtaatcaagatcacaggcaaagaaataaacgcgtttccattcgcaaaccaatttttcgatttatttttcatggtgattcctccttcaaacgacactatggcaccaatctaatgactatacgaacgattgctgcttaacaatctcctctaatgggaaattattggtaccagcagctatcgttcgtatctgatttgttgattatgaaaccatagctaaatgatttgcttagtttgcgatttgtgcttctacttgtgtttgtgcatcttctagtactttatcgatatcttccccattgattactcgctgcaagctttctgtcaatacagattcgatcgcataagtatgattgccgtagttgacggccgggatctcttgtgaccattgagagaagtcttggaaaactttttgtcctccataaaaatcaagtcctgaagtatattcttttgtctcttcggcagcattcatcgttgaaactagcccaatttcagttgccaatgttcccatcaattctttatttgaagcaaacgttttcactaaaaagtctttcgcattctcttcaccagctacgcctttaatgacataccatcctgctccgccaatacttgatgcgttcactgaattgccaccagctagtgccggaatcggtgcaatcgcccatttgccgctttgatcttcagccccttgaatcgtactagaataccaagcgcctgttggtgctgcagcaacatttccggattggactgcattgacgccgccatcccaatcagagacttgttcaactaatccttcattcagtagtgtcgccaatacattcaagccggctttgaatgattcgttgtctttaatcgttactgtggtgccgtcttcaccggtataccattcaccagctgactgcatgatgatccgtgccaatcccaaatcgcttggatccagagacatcatggcatgtcccgttttctccttgacatctttggcaatttgaataaagtcatcccaggtaatatcttggagatcagcagcttcatatcctgcatctgctaaataatctgtacgataaaacagccctgctaccccactatcaaaaggtacaccgtagatcacatcatcgattttgttgacggcgaatttgtagctggaaaagtcatcttcattgacaatatcagttaagtcgctgaaagcatccggataggaagataaatagccttgaatacgatagtcttcgatcaaaacgatatttggcaagccatccgtattgcctgatgctagactagtgttcaacttttgaacgatgtcatcctgtgacatggtcattacttccacatcaacatccttgttttcgtaaacctttttcgcttcattgacagctttgatattgaaagtctcatcccaagcccaaactgtaaccttatcagaagaacctccagtgtcaccagtactttcgttgttgctgccacaagctgtcaatgtcaatacagtagcggcagtcacaagtgatgcaagcaattttttcatttttctccctctttccttttaattacatttttactatacactggagttgtaaacggatacaatacgcgtggaagagcttactaaaatagtccaaaaatagaaaatttttactaatacctttcttttatgaaagcgtttatactagaataaagaaataggggggataccatgcatcatttacatacagtcttgcttgtggatgacgagaccactattcgtgatggtttaaaacatatgattcgttgggagcaagaaggttttcgcttgctaggagatgcagcaaacggacaggaggctctaaccctgatccagcaattacagccagagatcgtgatcacagatttaaaaatgccgcaaatggacggcatccaattaacaaccatcattcaacaacaatacccatctatccattttctggtattgagcagttatgatgattttcactatgtcagtcagtcttttaagaacggtgccattgattacttgctaaagccaacattgacgcctgctttgttgctgaaagccctaaacaccatccgcgaaaaaaaatctgatacccgccaaataaccgctgaggtcccattacaagaatctttgaatcgctatctggctgggtatgaagaaccacttactccttttgctgactatcttgaaatagctatgaaacagcaactatgttttctttatacgaatgtcagttattttcgttctactgaacagctttttcatgcattgacagaattttcgcaatcgaatactcacttaaaaacattagcgttcaagaccagtaacaatgatgcagggctattgatcagttattcagcagaatatgattttttttcctctttgaaaaaatgtttggaccagttgacctataccgaaccaaatgccttttttacccttggctgctcatttgaatcgattgacgacttacgcacagcttttctgactctcaaagataaaagtcgggaacaatcgtttttttacaaacagcagcggcttgtttttgagcatgaactttttatgtacatggaaagtgatcgttttgatacaaaaaaatttttgcgggcattattagacaataatttcctgttggggattacgcgtatcgaagactatttcaatgagatgattctatcaaatgttgatccgaactttctaaaacagcaggccagcagtattttttatacgctattatcccggttagaagaagaatttccaacagccccccgctttagtcgcttgcgagcggaatttcttcatgagatcggccatgtcttatatttggaggatttctccgatttgttgttgtcaacgatcgatgagatacgactgcaactgacagccctctcccctatggatgaagatgacttactggtctcgatccagcgcttcattcaagacaattatatgaagagcctctcactatctgagttggcagaaacgttccactttagttatacctacttgtcagctttcctttcttcaaaattaaaaatgagtttctctgattatctaaaaaatacacgtctagaaaaagccaaagagttgctgacccaatctgagttgaatttgtcagaaatcagtgaagcagttggttattccgatatcagctatttttctcgaatctttaaaaaagaatttcaagtcactccttctaagtatcggcggttgaaccaattatgagaatccaacagtggctcaaaaaaaatgaattgttcagccgaatctttttgtttgttgtggtaggagtaatcagtgtttgtttactgacagtgatcgttatctatggacggtccaaagatgcttatgtggcttcgtatcagagctcgaaccgcttgcttttggataagatccaggaagattatgagcgcttgaatgagaatatcaatcgtatttttgatgtcgtcgatgagagcaaagccgtagaaaattatttaaaaggacagctaaatcagggaagaacgattttagaactcaatgaacagttgaaagatactcgctcgctttttcaaacgattccttccaacttggtattgattggaacgaacggacgatcattctttcaaaatgatgctgtccgaaaccagtcggttgaaacttttttggcaagtgaatttacgcagcaaatcaatgaaaatgaggctattagtcaatactattttctggagcaagggttgagcacttctacgagccattcaccaggactgatgtacgtgcggaaattaatgaaagacgatgctttattcggttacgcattgatttttttgaaagaatctgatttttcttccatctatcggcaattgttagacacaacgctgcataccatctatgtggtcaatgatcagggacagatcttatccacttctgaagaacaaaaattaggcacagcttttgattcagctatgatcgaagtgaaaaatgattcagtgaatcagatgcctctttattcttatcagtttactttttatgatctgctggatgaatcgcatttagtacgcaacatgaatctgatcaagcctgccgtatggatcgcttttctcagtatcttgctctttagcctgtttgctttctggatcattcgtacgatcacacaaccaatttatcagttgatcgacaaattaccggcagtcacacagggtgatttcagcaacaaggtctcgatcaacgggacctatgaaacacaggaactaggacgtgcctataatttgatgcttgaggatttagaatcgtatgtcgatcatttgatgattactgaagcggaaaaacgcaaatttgaaatccgttccttgcaaatgcagattcaacctcattttgtttacaatacactcaccgcaatcaaatttttgatttggcaaaatgaacaggagaaagcaacacaagccatcgatagtttcgtccaattgcttcgccataccttcaaccgcaaagagatcgttccattaaaagatgaactcgccatcgtagaagaatatctaatcttgatgaacgttcgttatggtgaccggattcaatcagcgattttctcagcagaagaatgtgaaaattgtttggttccaaaaatgatcttgcagccaatcatcgaaaatgcttatctgcatgcgtttcctgaagaagagaaaggttacattcaaatcttctctcgtatcagtaaatcagggctagtcatcgaaatcattgatacaggtatcggctttgatgaagcatcttcggtgattaggaaccagacaagcgaacattattctggtatcggattggagaatatcgatcaacgaatcaaattactctacggggaaaaatatggcctgacagttgactctcgtgtcaatgaaggaacgactgtgcgcttattattgccaaaacagtaagtaacataattcttaaaagagccaaaaaaaatccagccattcgcactccggctatttttctcaaatctaagaaaatagcttccccagagaggccatgggtggatttcttaatcttaatcgcttacgttttttccattggaggcaatgacttattgctataaaaaaccaatcatcaatgaaccggcttccattggaatcctccattgatgattggttactccctatttttgtgggtatcttttacttttagatccgattttcgtgatccgcagttttgactaagttcgcaccgaccatgccgccgattgatgttaaaactagtcctaagaccattgctataaagccccatatggatgctttagcagtagcatcacttatttcatcagcttttttacgcgcatctttgactgcttgatcgatatcttgttttgcttgttcaagattttgctgtgctgtttcaatttgttgttgtgcttcatcagaagctttttgcaacccattgacaatattttgtgttgcttcttgtgcttcttgttgatttaaatcggtatttttcgcaaccgcatttgaaatggcttcttcgtcaacagaatcgctgatttttgttgcccgatctttgagcttcgttgaaagatcatcgatgatttcgtcagctttatttggatccgtagcaattttcttccctgcatcggtaatatcgctcgttgcatcagaaacttgatcttgcaagtagtttggctgtaattcaggaacgtcagtatcttttaatacatcgcggacatccgtttccaattgatctgtattaatatctcccatattccctgtgatctcatcaaaggcctttgatgcgacatctgctgttcccgatgcgacattctctacgccacttccgacagctgaagcaatgttgcccagtaatgagccgacaacagaaaatgccccaattgttacatatgataacatgacgattgtaacgatcatactggttgcccaagtaagaaatccatgtaccaaaccaacgcgtctagctgctacaccagaaacaaatcctgctccgaacaatgaaagaatcaatgtcacaacagtccaaatcatcaaacctgttcccacaccatccaatgggttgtttgaggtaggttccaccatgccaaagccgatcgctgagccgattaatgaaaatgtcataaataatgcaataaacgtcacgactcctgcgaaaatagagccccaagataagttataacctgcctcccgctcatttgctcctaaataatctctaaatccgtgtttcattttacatcctcctttttttcctctaaaaccagtctaacaaccctacgtttttttatcaatcaagccgacttatccctcgcccagaagtaaaaatacatttgtttttctattcatcagcactagcttttcaacttatatttattaggttttgtcaccatttcttgaaagataataaaaataatcgtttttgaagaaacccacgccattctcaattgtctcctaaccattctcacccctaaatggacaacaatttttcagattatttccatgtaaacaaaaaagcacaactaacatctctcttgttcgctaagaataatcgtcaaaaagcttttgtaccgcctttttctaagttcagcatgtaggatttcctaaggatcagcatcgtccatttactgaaatcacatagataaaaataagtacatgcacttgtcactgttttttaacttgtaggaacaggtattatgtgttattttaaaaacaaaaaatcttcttatatcgttcgtttattaattacgtacatatatttaaagaccgaataattattctatagtgattcttttactctaaaaaaacgcataaaaaaaaagtgaaaatctgctatttttgaatagcgattttcttcacataaaatccaatgataattttacaccgagattatttaattacacaacacgacaaaagaagaacttttttaatcaaaaattggtatctcaaacttacatttttgattcattattaaataatatttatgataatatttttaaaaggaggatgattatgtttgaagatctgttactcaccaatcatgcaaagaaaaaattagcaattttgacttatttaaatgagaataccaatcaaccaatcaatatcagtaaaatcgccgagcatctgggcttgtcttatcacgggatagcaccactcatagaggaaatgcaacaagagttttcagcgctttatcaagtttcgttatgtgaaaaaggtttcaaggttcgttcattagaagaaccactttcctattcactttatcagaagtatttgattcaggaaagccttgctttccaacttctacttacatcgatcatgaacccggaaatgaccatcaatgatttttcaaccgttcattttgtcagtcattcaacgatcacccgggcacttaaaccattgaatacttatttattgggaaaagaaatccatttgaatgtttctcagttgaaactgactggaaatgaaatcaatatccgttcattttacgttcaaattttaacttatttagagaactcaccattagaagcggattacttaacggacttcagtgatcaaacggttttgatcaacgaattagcattacaaaagttttctcctgttaaccaacgactgatcttagtcattttatttgtatccaaacttcgtttcgaacaaggctatttgcttaacccaatcaatggttttgaaaaattattttcaaagatgaaccatcctctagaaaattattttacggcatttataactgacgaaaagcaagtaacttatcagatcaattatgtcaaaggaatgctgttctttctagtccgtttcgctgagccaacaccagaaagagctgctctactttgtgatttctatgaacagatcaaagaagatgatcctatttttcatgagtttatggctgattttagtcacgtattattaccagaaatcgttgggatcccttttgatgaagaagtattttctgaaattcaaaaagatagcttcattattctgtatattttttatgcaaacaatggcctattgattgatttttggtctcaaaatgagttgaatctatcctttcaaaagaaaggatttacaaatctacagaaaaagattcgtccatttttgacaaaatacactcgacgtgttggttatgaatggctcaaaaaagccaaatcgctagtcctagactatctgacttttttcatatatccgttttatcaacagcatcatttacaaaaattacaggtgggaatcattccttcattgaatttatcagccattcagcaaatcagttttttactggatcacattcaatttgtggactatgatatcgtaagaaaccacgaaaaagactttgactattacatcgttccagcaaatagattgttgccagcaattgagtatcctgcttatgtcatggaagaaactgagactctaaaagagttgtcgccattatttgacgctttatgggaggaatatctgacaatcaacgacttttcgataaactaaaaaaccagtggcttcctttttggaatgccactggttttctgtctatcattcttgatttaacatagaaaaaagcagaaatcgctgttttcctgctttttcctacttcaagttcctgtttcctcctaagatcgacagcctggaatgcctgctaagcaggactttggggagaggtcaacgaccttggaggagcaaatagtaaattattactagaaaccacctattttttgcgctatcgaaatctgaattcaatcagatttactgaacgaacgtttagcgtaagaaagaaaaaatgttgatcatattttcaacaacttcccatggaaatccaaataattgaaacattttcttttcctcctttaattgactttcctttagtttaattggaaaataggactatagttgatttggactattttttcgtccacctattttctaggtgcatttaggaggtgcttttttggaagccaatctattactgaaaaagttacgtactgaacgtaatctttcccaaagaaagttagcagccgatatatctgagcggagcacattagctacttttgaacaaaaagggcatcgaattgcttttgatatcctttacaaataccttgatcgcttgaatgtgactctcgaagaatttgaataccatttgacaaataatcaattaaatgaaaagaagcaactctcgaaacaatttcacaatgcttattaccaacatgattttgatcagctggccgtcttgatcgaagaatctaaaacaacgtatcaggaaacgcaagactttttctattatttgctttatagccaatactatttgatcttgaagaaaaagggatacgtacatactatcgatgaaacagaaagaattgaaaccgtgataaaaggttatctcgacaaaatcgaaacttggggaagatttgaaatcaccatttttgcaaatctaatgtttctttttacagacgaatatattttgtttcaaatcgagcaattgaataagcaggagttttataataacttgcttagtctcaattatcatatttattctaagctgttgaccaacgctgcctttcttttcattgaccgcagtcaaatcgatcatcttaaacaaattttgttttatatgaccaaaaatattccattagacaatgaccggattcgattgatgatccgctattttgaaggaatcatcgcgattttccatggtgagatcgaaactgggaaacaaacaatttcaaagactattgagatcctaaactttttaggacaatctgcctatgccgctgaattaacagaattagcaaccaacgtcctgttgaccgtagcgccttctgaagaacctttcttataatgtcgttgttctcaaaatcaatgtaagaaaaaaaaacgatctgaatgccttttttcggccccaataaatggtgaccggaaacagtgactttcagatcgttttctttaattgattaatccaagggaagttttccattcaaggactcgtttgacggaagcatcgatggctgcttccggataattaccacttctgacagcatccacaatcactgggatctgttgctgataggtagatgacatcactaaatcattccctgcttctaatgctctcagccctgcttctgattgggaaataaagtctgctaggcccgccatatccatgtcatccgtcatgattactcctttgaaacctagctgcttcctcaataaatcatggacaggcttcgaaatagaggctggtgcgctggcatcaatactggtaacaatattatgtgagactaaaatactgtcagctcccgctttgattccagcttcaaaaggcaagaaatcattcgtttccaactcgtctaacgaacgttcatctgtaacgatctctacatgagaatcacggttattgccgtatccgggaaaatgcttcaatgttgagccaatccgcttctctttcaaaactgcaatgtttctacgaacaaattcactggttccttcggcatctaagcctatggttcgatcgtagataaaggcattcggatcagtcgctacatcggcgaccggaaacagaccggtagaaatgccatattcgtggaaaatagctgccttttgagcagtatcttcttcaattgcttgccagcccccttgttggtaaagttgctgaggggataaaaatggtgtttgtaccaatgcagggttgcgactgattcgagtgacagttcccccttcttcgtccattccgatcagcaaagggattgaactggcttgctgataatcagcaatcttttgcttcaacgtctcagctgtctcattctccgtatcacgtccgaataagacatagccgcctaaatgataggtttgtagatcttcgacttgattgatttcaggcactcgtacaaaaaatagttgcccgactttttcttctagactcatttggtcaatccgcttatcaatcgtcgtttcctcctcagttgattgttcgggaatactcgactcggtacttagagaacttgttgacgttgtttgtgaagcgtttgtcggttcttccccatttgactgttggtccatcagccacttcattcctcctataatgagcaacagaagcaaaataaagccacccataaggattccttttttattcataaattcctccagttcataaattcctcgtcttattttacatcagcctattttagcatgccttttaaggtaaaaaaagcgaacacgacacactcaagtgtactgttcgctttattggatgtttgttttttattctttttttgttgctaaaatgattaggtaaaacgccgagtcaagcgtttataaggcactgcgcgcccaacaaagtagatcaaaactgtctgaataggaaacatgataacagctttcatcaatcgagccgaccaaattgcccagcttgttaatggaatattcagcatcattgccaaccagatcggtgtcaaaatcaatgtgatcagaagggtattcagcaagaccactgttgctgcccgtttccaagttacttcctttctataaaaaaagtaaccgtagatcaacccacctacgaatgcattgatcgtaaatccgaagaaataagcggatttagggaataaaatcattcctgctatatcagcgaccgaagcccctacagcagtccagaatggcccaaaaagcatccccataatcaactcaggaacaaaagtgaaggtgagtttcaaataggctgtttcaaaccccaagatttgcgacaagaccaccatcagggcaatcaaaagccccatgaccgcgatcatgtgtgcgtcgacttttcttttcataacgagcatctccttttagagctgctacaaattcatgcagcgaatgcgaaaataaaaccgcgaacgaatcgttcttcgtccaaaaggcaacatcccatcctttcgacacttaacgctttatttcctactctgatttatttaggtatctctacccagacaaactatagcacagattctagtggtcttcaattttagtccctttaatgacagctgttttttaagaatcgttcgtttttttgccgtatcttgggcaaaaattaaggcagagcagtaatggaacccaataccactgctctgccactttgattaacgttgatcagccaatgatattatcgttgatcaacacacgcttgatgtttttcaattcgtgagcaatctcaacttgctcgatcgtcaaacgttgatttacttcttccatcgaatggatttctttgttcaattcattgacattgtttaccaaatttttcagtgcttctaaaatcaattgattactgtccattattcctatactccttgtctttattcttctctcgaacgttctgaaatagcggcgctttcgacgactttttttgttttataaaagaatttgtacagtacaataacaacgaccggaatcactccgcaaatgatatagatttgagaataattaaacatcccctttaagctacctaatgcataaggaccaacacctaatcctaagtctagaccaatgaaataagtagaaagtgcaacaccgatccgatgagaatcgacttcttttagacatacggcttgtccattagacatgaatgtaccatagccaagtccaacaaaacagccagaaatcaacagcatcaagctattgccagtaatactcaacaagaacaatcctaatgtcaagaagataaaacttggatacatcactgcatctgcaccacgacgatcaaacaagcgacctgtcattggtcgagtgaaggttacggataatgcataaacaacaaagaagaatgcgcctgcggtttctaggccaaggtttccggcataaatagaaaggaaacctaatacactggaataagacaacccaatcaaaaaggccagacctgaaataaacaagacttttggctcaacaaaacttctgaatgaccatttctttagttctgctcggtgttctggtgttaaggaaatatttttcactgggaaagcgaaacaagcaatggctgttactatcgaaagagcagttgctaataggataataaaatcaaaaccaaaagagggtaacagcagcattccgataaatggaccgacagcagctgctaaactcgtgcttaatccatagtagttgattccttctccatgttttgaagagggaatgtacgccgtaacaattgcatttgccgctgtagacactgctccataggcgaaaccattcaagaaacggacaccatccaaaatcatgatattcgatgaaatcaaataagccgccgtagttatgacataaaaaatcattccccaacgtaagatggcttttcgtccaactagctccaataccttaccaatatacaagcgggcaatcaatgttcctataatatagatccctgctgcaaacccagcttgtgcagcggaagcccctaattcttgcgtagcaaactttgccgtgatgacgacaaaacaataatagaccagaaaaacaataaaattaatcaatgtaatagtaataaaacctttgttccatagtttttctgtttgttgctcctgttctgacatgttgtgttttgctccttttttattgtttctttgtttcatcatcctctttctcagatgacaggtctaactatacctgatatttcaagagcgcaaattcgcttttgttgctgaaaaaacgcaaaaacataatacattaacatttgttattgctttttgagttagaatgttctttaattaaaaaagaatattcacccagatttggcgaatgtgactgttcattgaaaaggaaacactataggaataagaggagtgctttgtttggtaaaacagctattaatggactatttagaacaaaataatattccagtagtcatacgtaaaaaaagaagttatttgacgtatgaaggaatccctgatcgttatgtctatattttgaaaaaagggatcatcaagacaagtgtcgtcactcatgaggggcgtgaattcaatttgcgctatatgaatgatttcgatattgtttctctctttaaagatgaatcttcacaagaagtcgaagcgcccttcaatgtgcgtgtcgagtcagaagaagccgaattatataagatcgtgcgcgatcaattctggacagatgtcaatcaaaatcgggcgttacaagattatgtcaaagagtactatcgcaaaaatctaatgtactccatgaaaaaaatgcagcaaatgctgatgaatggcaaatttggtgcggtctgtacacaattgaatgaattatacgaaacctttggggtaccagtgggtgaaggaaccttgattgattttgaggtaaccaatgaggaaatcgcccgcttttgcggtatcacttcagcaagtagtgtcaatcgaatgatgcagcggttgagagaaagcggtgctatcaagactcaagaccggaaactgttggttttagatatcgggtcaattcgcgaaaatattatttattaaaaaaggcagctagtcgaatttcttttgactagctgcctttttgtttaacgtgttttgtgttgtttgaattaaatgaaatgaactgtttctgctaccgtgatcgttggatctaatgattggatgactggacaattcggagaaacgagtttgagacagcgaatggctttttcttgatattccgctgaaatccgcgcataaaaattgatctggatcgaagagatcggctctgctttcttcgtagaatctctcgtataactgacttcgattttttcaatctcagcaggcacatgagaattttccaaaacagaagtatacacataaccgccacaagctgcggctgcagttacaagcatctgaaccggtgagtatcctagttctcgagccaagacccagttgccattttgctgtggtaattctaatttatcttttcctttaaccagtgttaaggtttcaactgccatttttttctctccttacataatgttctttttctacttctatccattcaaaaagaggacttaaagtgatcgtttcttggatgtctttctgatccattgctgctcgagccagaattggatcagcgattggtgctgctgccaatagtttctttgtataaggatgctgagggctttcaaagagtcgttttgttggcgccaattcaaccaattttccttgatacatgactgcggtgcggtcactgatatgacggatcacggataaatcatgggaaataaataaataggacaatgaaaattctttttgcagctttagaagtaattgaatgatctgcgcttgaatcgacacatctaatgcagaagttggttcatcacacaagacaaaggctggtcgattaacgactgctcgagcaatcccgatccgttgacgttgtccaccactgaaattccgaggaaatttatggatgtcctctcctttgattccaacgatcgcaagtatctctttagcctttgctcgtgcagcgtctttcgtttctttcagtaaaggctccatcactaactccaaagcagtcattcgtggattcaacgcagaataaggatcttgaaaaattacttgcatctgctgatagcgtttcttttgttcctctggtggcaaacttgccagctcttgtccctcaaaaaaaactttgcctgcagataaagtttccagattcaaaatactacggcctaatgttgttttaccactgcctgattctcctacaaggcctagagtttcgccccgatggatcgtcaaactaacattctctactgcgcgcacttctgtcactaccccacgccagtttttgcttcgaaacgttttgctggcctcttcgactcgtatcaattccttcaattgcttgcccctccttcccaaacacgatgcgtctcagagatttcccgaacgtgtaacacatcaggaagttcttcctgatagtcaaagacaactgtttcttctttatcccctaagtgggcggcctcgagcagttgcttcgtatagagatgctgaggttgatagaaaatttcttcagtagtcccttcctctaccactcttccttggtgcatcaccttgataaaatcacacatgccagcgacaaccccaaaatcatgggtcaccagaacgaccgaaaggttctctgctcgctgcaattgcttgatcaatgccaagatctgagcttgaatcgttacatctaatgcagtcgttggttcatctgcaatcagcaacttcggctgtgccaacagtgccatagcgatcatgacccgctgccgcatcccccctgataattcatggggatactgcttcatccgctgttcaggaagggggatccctaccttgttcaactccgcaatggcaattgtttgcgcagctttttttgacatcttctgatgtctgcgaatgacttcaatcaagtgatacccgatggttcgcaaagggttcaatgatgtcattggatcttgaaaaatcatggctagcggtaatttgctgcgatcaacaactggttggccttcaaaaacaaacgagtcaaaggagtcggagatattttctggtaagatccccatcacgcttttcatcgtcatactcttgccactgcctgattcaccgacgatccccacgacttgtcctttaggaatgactaggtcgatttctttcagcagctgctgatctccttgttttctatgaaaaaacacgtttaagtttttcaccgtcagtaatggctctgtcatgcttgctacacctcccgctgcaagacacgtttgatcatgtcccccagattattaaatgaatagatggtaaaaatcacgaataagccgggcagaattgccatataaggggctcgttgcaaactgctttgggcattttgcagcaaactcccccaagaagccattggctgttggattcccattcccaaaaaactcaacgcagattctgtcatgatcgctcctgagatgctggcagaagctgccacgatcagcgtaggtaaaactgctggaaaaatatggcggaaaataatactaaaggatgtccgaccaataaacttaccatagacaacatattctctttctttcgcagcaagtgtttctccccgaatcagacgagcgatattcatccacgaaaagcctccaattacaataatgatcgtcgtcaatcccggacgcagaaagacacttaaaacaatcactaataccaaccaaggaatggaagacaaaacatcaacaagacgcatcaaaagactgtccacccaaccaccaaagtatccagcagctaaaccgaccatcgtgccgatcaatgtcgctgtaatcatcgctagtactcccactaataacgagacccgaccgccgtagacaactcgaatgaaatagtctcgtccaacttcatccgttccgaacagatgggcccagctaggtgcttgggacatattgctgacatccgtcgcattcggatcgattggaatcaaaggcgccgctaatgacaacaaaatcagcaacgtcaaaaagataaaagaaaaggcgtaaactggagaagagaaaatcgcctttctgattttcttcaatcgtttcatgaacgattcccacctttacgtattcttggatcaacaatcgaataaagaacatccgccaatagattgcctaaaataactaaggtcgctgacagcaacatgattgccatgataacgggatagtccaaacttttcgtagcactcatcaaataaggaccgacccctggccagccatagatggtttctgtaatgattgctcctgtgaccagcattggcagtgccaaaccaatttgcgtcacgatcgggatcaacacattgcgactgatatgacggctaaaaatctgccatttcgtagcgtgaaatgcctgctgtacaacgacataatcttctgatacttgttgcgtagctgaggcgcgaatgtaccgagttaattctgggaaaaaagcgaccgtcagtgttgcataaggcaaaataaaatgttgcagaaaatcgttgaaatctccttcttttccaacagtatacatcccaatgataggaaacagattcagccgatacccaaaaagataaatcaaaatcattgcaaaccagaatgtaggcaccgcgattcctaaagaagcaataccgtcgatcagacgatcccatacttttcccttgtttgctgccgccaacagtccgagtaaaattgctaacagcaatgcagtcagatacgctggcagaaccagtcgaatcgtattagggattctgaccgctaattcttgagcgatactgttctgggatactaatgaaaatcccaagttccctgtaaggatgtttttgatccatagaaagtattgcactagaaatggttgatccaatccatagcgttgccgcaacagatcaatttgctcttgtgtcatatttggcgttgtgattgaatcgatcacatcataaggtgcgatatgaatcagtgaaaaaacgatgaatgaaataacgaatagcagaggaatagcctgcaatactcgcttcataatatatcggaacatggtttcccttctttctctcaaaaaaaatcatgacagaaggcagctagacagataacaaatcgcatgcaccagaggagcaagaacctaagtatttcatccaactgatatccgaagaaacttgagatggctcctgtcatacaagagcggttgtaccttcagcgtctacctctatctcaaccatttcaggcattttcatctggatgttacttagggcacagcccaacttcttggtgcagatccgccaactttaaagaaggcgaatccgtctatgttttccgtctttctttgacttctgtcacaaccattcatgttacttgatcgtcaattttgacatatcttcaaatgtgtagattggaatcaagccagcttcttctacattggcaatgcgattgttgacggctaaaatctttttattatctacgataggatagattcgagcatcatcagcaatggcttgttgcagctggtcatataactctttccgttttgtttcatctaactcaaccgctgctttagcaaacaaatcatcggtagtattgttctgtgtttggaaataatttgagctgccatccgttttgaaaagcataccataaagatctggatcatttcccatgatatagccgcctaaaaataaattgtattttgtcgaaccggcttttttcaattctgtaaagatcgctgttccatcgccgccttccaatgaaacgttgatacctgcttgctgtaattgttgttgaatcaatgttgcctgaatcgtttgcgcaggatccgttgaagtaaatgctagattcagttggagattggatacacccgcttcttgcaaaagttctttggctttttccacatttgtttcatatttttccacgtcttcggttgcgtaaggattgttcggtggcaagaaagaatatggcgtatcaaaatattcatcactcaaatacgctgcctgattcatttcatttttgttcaaagcataaagaaccgcttgtcttactttgacatctttgagggcatcagaatgagtattcaatcctagataaccaacccgattttcagtatacggatatactgagatcattgattcatccaaatcttcaatatcagaaggcaagacaactgccgcatctacttcgcctttttgtaaagcgactttagccgtatcagtactttcaatgatccgcaacgtcacatttttgattgctgcttcgccgccgtaatagttttcattggcttcaaaagtaaaatattcgccgcgcttgtattcctttaatttgtaaggccctgttcctacgggggtttcaggcaattcgctaacagaaaaatcagtcacatctttataaatatgttcaggaatgatatacgtttcagttgcgatattatttaatgctgctgcacttgcagaaggtaaaacaaacttcactgtataatcatcaactttttcaatgctgaccggttttccatctacccataacgcatctgcattgccgttttcttttttcactttttgttcataagtaaaaacaacatcctctgcggtaaaggcttcgccatctgaccatttcacatcttttttcaaatgaaccgtcaaggacaagccatcctcagctggctcaaccgaatctgctagtgcattttgggttgttccatccgcttcaacaatcactaaaggagaatagatcatgttggtgacagtcagcccccaacggtcactcgtattgattggattcgttgacgttggatcaccgctgatcgcataagtgaacgtgtctttatctcctgcttgagttgaagtttttgttgttgaatcttgagtactggatgaggagcacgcagctaagaataaacctatactgataatcgctgtcccaatcaatccttttttccaatttttcatcgttctcctactttcttaccatacaggtatacttgatttttttgttactttatcaataatttctttgacttcatctgtttgataatacttgatgatcgtctgatacgtctgattttctttttcctccgctcgggccgcgatcacattgtaatacggtttggacgaatctgcgacaggctctaagaaaatcgcatcttctgttggcacaaatccggcatcaacagccatcccattgttaatcaatgaaatatcgacatccgttattgctcgcgcggtctgattggcatccagcaacttgaacgtcagctgcttcgggttatcggtgatatcattcgtcgttggcagcagaccttttgattgatccaatgtgatcaccccggccgtctgcagcaacaataatgcgcggctctcatttgaaacgttatttggtaacgcgacagtagcaccatcagccaattcagcaatgtctttgattttgtctgaataaatccccagtggattgagtgtggtataagcaatcgttgtattggaatatccgctttcctgattgacattatccataaaaatctctgtcaaggctgcgtgcagatcaatcgaaccgtcctctagtgccaggatgggctgacgataatcagtaaatttaacgagctgtagattgatttgctctttttccaacaattgttcctgaacatattcccaagcttcattttgctctccaacaaccccaagctttactgtagttgcctctgaggcaggtttgctgcagcctgccaaagcaaaaaccaatacgcctaaaaatacgctaacccattttttccaacttattttcatttttttcttcccctttttccccctttgagcgaagcctacagaagcaacgatccctttcttgtgattgtcgcaaatagacgcaatgactggatagaatacttagtacttaactacaactttacatttcctgctgtagtcagttgatcatcggactaactattcatatgtagtgtaactttatcttatacaccaaaaactgtcaataaagaaactctagtaaagccttgcgctatatctttctatagtactcgcaaaaaggggtttttttagatgtaagacaatgcctgcgtaagatccgcaatcaagtcctgactattctcgatcccaatagagagccgcaagagatccggcgtcaaaccataggactcccgtaattctttagggatatctgcatgtgtctgcgtcgtaggataagtgatgagactttcaactccgcccaaactttcagcaaatgtaaaaattgagagttccttcaaaaatgaacggactttcactgcctcctttaaccgaagactgatcatacctcctacaccaggatacagtacgtctttgattgctggctggcgttttaaaaacgcagtgatttcttttgcgttttgctcttgtctttcaaaccgtaacggcaacgttttcaaactgcgaatgaacaaccaacagtcgaagctgcttaaagttgggccagtggtattggcaagataggtcaagcgttcaccaagggagacttcttttgcaatgatcacaccagccaaaatatcattgtgacctgtcaggaacttggtcccagaatgaagaacgaggtctgcgcctagttccaacggtttttgtctcaatggtgtcaaaaaagtattgtcaacgatgagtaaagcattgacttgatgcgcgatctcggcgaccgcagacacatcaatttctgtcatcaatggatttgtcggagtttctaaaaagaccgccgcaatcgttgaactgatttgttcttcaagttcgtttagcgtattgaaatagtgaaaataagcaatctggcgcgcttgtaactcttcaaaaaaacgataactacccccatataaatctcttgatacgagaaattcactgccgcttgggaaaagttcaaaaatcaatgcgatcgcactcatacctgagctcgtgacgattcctcgagcgccattttctaaggtagccagcccagattctaatagctctctcgtcgggtttttggtacgtgtataatcataaccggtactttgacctaattcaggatgcgcataggtggtagagagatagattggtgcactgacagctcccgtcgcttgatccgaacgattgcctagttgtgctaaaaaagtcgtcatatcaacagtcataatcgtattttcctttcttggtttagtgtgctcaatgaagcgggataaagtcgttgtcgcaagattctgacgatagtagtgaaactagttgccttaactgccaaattgttcgttgatgagtagaatgaagcaatcatagccttttgtgaaacaatgaagcaaaatgagctgttttgatcattcgctgtggaaaacctgaccattgatggagggtagaagtaaatgagtacagcagtcactggtttaaaactagcgggcttttcagatcaaccttctttgtctagcgctcttttgtttcactgaaaaaaacattgactaaagtcactgccgcctatgtccgccctcccattcattacctatataataaccagtacgcgttggcagaatctgtaaatcatagggcgtgcgctggtaggtttcgtggatccagttactgaaaaacaaggacgcatgccctcgccagcgattgatgaccgttccttgctggtcggaaaaataatttttggggagtgccgttttgagccctttggctttatctcgcaaatattcttctttcaacgtttctgtatagtattccaaatgccctaaaagaaaactatttttatggtcatgggaaactaagagtgctggaccggtctctattcctgtaacaagcacattcagaggtgcaagtggcagctgcgcctcattgatccccgtataacgagaatggggcatcatgaaggaatcattaaaccctcgtatcagcggatgagcctcgatcactcgctgttcaaaaataccaaaaagtttttgcttatgaagcactttttcgataccataatgatagtacagcccagcttgtgctccccagcagatatgcaataccgatgtgcaatttgtttgactccaagccatgacttcctgaagttcctgccaataatcaatcatttcaaaaggcattttttcgactggtgctcctgtaatgatcaaggcatcgaaacgttcctcactgactgccttaaatgcgacataaaacttgtctagatgagtcgagctagtatttttgctttcatgttgctgcattttcaataatgttacttcgatttgcaaaggactttgggacaaaagctgcaacaattgattttctgtagtgattttttgcggcatcaagttgacgatcgcaattttcaaagggcgaatttcttgtttgatagctcgctcttgttgtaaagcaaaaatgttgtgcttcaaaatagctgctgccggtaattctttggggatgatgattggcatcttctcactcctttttcaatcgactcctatgaacatttactttttattaccttatcgtttctcgtggtttcacctatcgttgcttctgaacatggttggttcagtgtgacttgcatgccatgctttgcatgtcagtcgcagtgattcgagacgtggtgactacgttcccttcggtcgcctagtactgttcatcatctgctctgcgcttcgcctacagtcgcttctaagcatagttcgctaagaaggacttgcatgccatgctttgcatgtcagtcgcagtgattcgggacgtggtgactacgttcccttcggtcccctagtacttgctcgtctactctgcgcttcgcctacagtcgcttctaagcatagttcgctaagaaggacttgcatgccatgctttgcatgtcagtcgcagtgattcgggacgtggtgactacgttcccttcggtcgcctagtactgttcatcatctgctctgccatgctttgcatgtcagtcgcagtgattcacagcaaaaagtcgtcccttttatcgttaatgtaacgataaaagggacgactgactcgtgttaccaccctaattcgtgctgcctttgcaggcgtgcacctcaacagtaccaatgatacttggcgcgttatcgggcgcataccgtctatttggcgtgaaccaaataaaaactcagagctcatcttcaacgcctgtctcatgtctcctttttcaccaaccggagtctctgtaccttcaacgtagcgcttactcttctcttcaacgtttcatctctatttgtaatttctaagaattataatcgttctttcattcaatgtcaatccgcttttaagactttggcttatttctttgaaagatagagatattgttgatccatttgttcatagatttcttgcagatcatctcgtgagacttcacgatccttgtagccataaggatcgttgacatacattttgtctccatctattccagtaataacaacggaatggatcaatgtcgtttcgtagatcattcccgattgcgtcggccactcaaaaaaatcagcattggttggtacttgcaattcaagggtagcaatcatccagataggcgtgccctgctccaaaacttcaataatctcatcaaaagatttgtctcgaccacttaccacttgataggaagcccctaccatctggctcgcaactttggcgattggctctaccgcaacccccattgctccatcgccgccataaatattcccaacaaaaccttctcgtgggtctcctcgatgagtttcatctgcgtaaacagggacatagtctaatttggcagccagctcatttttatttgtatcatacccgtagaaattcaacagcatggataaagcagtgacttcacagccatttcctaaatattctggatcaaattggctttccaatggtacatctaatcgaatcacgggctcttctttttctgcagtcagatccagtcctgatatcgaagtcaccgattgtgccgcttgttcttgcttcttcacataaggagttactccagctttatcatagaaaagccagataaagaacaaactaaaggtgagcagacctaaaagcaaactaatgcttttctttttcatcagtttactcctttcttctttgactattataccttgaatgtcaaaggaacgaaaagaatttatgttttagaaccataatttaggaaaacaatgcttctcaaaacgttgaatccaatgatttagaccatccctaaatgagcataaaaagaagctaagagaacatggagaaagttcccctagcatttaccattacgctttgtatttgttgtctaattctaagaaaggacttgtttcttttttcctagtaatagtttttttgcgcttgaaaaggaacgaatatcgaactgtttgcttagtgccccggcaacaaaataggctaagttataatctatcaaactatggatcaagccaccgatacccatcaagacaaacaagaagtagtaaaaattgccatcaaacgcggtgcctggtacattgccggtaaaatagaaaacagctacaacaagcatttccacaatagaatggataaggccaatcacaagattaaaggcttgaaaacgagcattgaataatgttggcttgccgttctttaataaaatacttggatttttttgtaaataaaatgccccgatcacggcaaaaacaacgtgcgacaatgcccgcaaagcaatgatcggcggtaatgtgataaaaaagccaaatgtggtacctaaagctactgctatcgccatccctggtgaaaagaacatcgccacaaacaatggcacatggctagctaaagtaaaggaagccggcccgatgacgatcttgggcatcaccattggaataacgattcccataccaatcaaaagtgctgcaatcgttaaatgacgtactgaatgtttcttcatgaataattcctccttcaatgtgtcttgacacatttatctcgctcattgtagcttgaaaacaccaaggtgtcaagacacaaaaaacaggacgatgacctaagtatgaacagacaaaaatacctgaaggagataaggtagcgaattctgttaaaagtgccccttgaaccaacgatacggttggaataggtcctttcccctttccttcagatattcagtttgttgcctcacttatgccacagcccctgctgtttcattattcatttatttcaagtccctttttgtgcgccagcatttcattgctcaaacgtgcgaattctgctaatgacaatgtctctccgcgacgagttggatcaatttcactggcagctaaactcgctttaagccattctttcgttttttcatcttttccataggaattctgcaggttattccacaacgttttccgtcgtaattggaaggctgccttcgtcaacttgaagaattctttttcatctgttacttcaaccgcaggagttgcacgacgagtcagcttcaagattgcggaatccacatttggttggggcacaaaaaccgtcttagggacaatgaaagcaagctctgcttccatgtagtattggacagcgatcgataaagagccatacgctttcgttcctggaacagctgaaatacggtcagccacttctttttgcatcatgacaaccatttcttggattggtgcctgtgattctaagaaatgcatcatgatcggcgtcgtaatatagtaaggaagattcgctacgactttgattggccgttcatcggtaaaagcttctctgatcattgtagacaagtctgcttgtaaaacatcttgatgaatcacttgaatgttcgaataaggagccaatgtatcttgtaaaactggaatcaaacggtcatcaatctcaaaagccaggacttgacgcgcatgtttcgccaattgctcggtcagagcgccgatccccggtccgacttctatcacatttgtttgatcatcgattgcagcagtcgcaacgattttgcgcaaaatattaggttcagtcaagaaattctgccccaggctctttttgaaggtaaagccatgttttgctaatatttctttcgttcttgatggggttgcaatatccctttgttctttcacaattcttcctccactatcttcattgcttcagccaattctgtttcagtaatacgaaacatggcaagacgtttttccaactgtttggcattcgtataaccgattcgtaaaacatctccgagtttttcccgttttgctcgtgcttgctcaccagcaatcagtccatagcttgctaaaacttgacgagaaattttctcactctcgtcttcatcttgttgactggctggcgtgacgactttgcgaagtgcttctctaagcgcttcatcactagcgtgttccacacctaaactgccctttttctttggtgcagcttggcttcgaggcaaaaaagcatgttgggcagccgggacagcttccattatgattttacgaattttttcacccgaaaaatcagggtccgtaaaaacgatcacaccacgagtctcttgggcatgttcaatttgacttaagatggtttcgtcaatcgctgatccgatcgtttcaatcgtatcgacatcaaacacttcttgcaatcggcgcgtatcgtctttcccttcgacgacaatgatctcttcgattctccatctatccttcataaaggttgaacaacttctcagcattgatacacgtttgcttggcgacttcctcaaaagacatctgacgcagttccgcgattttttcgactacatagcgggtataccctggttcattgcgttttcctcggtaaggcattggtgcaagataaggtgcatcagtttcgactaatagacgatcgatcggaaccacttgcgcagcttcttggacatccaacgcctttttgaaggtcactacaccactaaatgaaatgtgcatacctagatccaaaaagcgctttgcccattcgccatcaccactgaaactatgcatgatgccgccgatatcagtgattttttcttcttttaaaatctggtacgtgtcttcgatcgcttctcgggtatgaatactgataggtaaatgcatctctttagcgatcgcgatttgccgacgaaagacagccgattgtacctcttttggatcttccatccaatgatagtccagtccaatttctcctaaagctacaactttgggttgtgtcaggcgctcttggatgaatgcctcaatctcttttgtgtaagatcccgcttctgttggatgccatccaatgatactgtatatcccatcatattcttgacttaatgccaatgacttttcaatcgtaggttgatcaaatccgacaactgccattttcgttactcctagctcgtgagctctggcaatcgtttcgggaatctcttcattaaattgttctgcatttaaatgcgtatgtgaatcaaaaatcataaaacttcctccttgtttcctctatactctagcatattttgcggctttaagaaacgaatccttcttgttttttcatttgctaaagaaagttttcagcaatcaagaaaaatcagcccaaaggtggagggagaaaaaaagccagtcgattataatagacctatgatccatcagattcggaggtgaaaagatggaaaaatcaaaaccatttacaaaatgtacttcacggcaacgctatcactattatcgtcagcaaaatgctcatcaacaatttaacgggaattttcaacaaaacttccaaaaagatttcccaagttttgctaactggcttaaattgcagcaaaagccgattgccaaagatcaaacagcgacattttctcactggttcttactgattctatttagtttagtgactgtagccacatttacccaacagctcttatttcttttatttgtttttgtcattgcagcactagtcaaaggtcctggaatgattctctggggagttgtctattcgtttctagtgacactctttcctcctcttggtttgttgctttcagcgcttttctttctgctcactctcaggcagttgacaagaaacttgacctttatttttacagctgtgtacttttacagctaccctttcttgatcacagcgattcatcattttacaacattcgatgatcaatggatcatgattgcagcggttatttttgccttgatcagcgggcatcttttgtttaagcgaaattatcagtttgcccctagtaaagcagttgcttggcgactgatcaccactccttatgattgtttgactgcattgattccttcaaagaaaggacgccgattacaacgactgcgaaacaaatgatttttcggaacctaaagcttgattccacgctgacattgaaactgatttgccaacatttaagatccatgcctagtggaaaaggacgcggacatgaacacttagacttcctacaaagggcttctgcaatgcaggagcccttcgcctattatttaagatgtgcttgactgctgctcttgttatctaagctggatattttcatcgttaaacaaaaacaatggaaaaagtaaatttgtttttttattttttgaaaatcaataaaaaaaaggaaaaaaatttttactgaatgtcttttgtttgattgcttttttggggtgaatctactatgctattagttagctaaacaaaaaaggagacccgctatgctgaccttcatttttatcttttccttccttgtgggcttgcttttttacgcctttattattgagccgcgccgattaaaacagcggcattatttgatcaaaaaagaaaagcaaacggtccttgatatttccaaagcctatgatctttatcaaaatgaacagaatgtagtagtcgcacatatcagtgatctacacttttctcgttggttcaaaccgcaacgcatcaatcgtatcatccgttccacgatcttaaacaaacctgatttgatcatcatcacgggtgacttgatcgacaattaccgtaagtggcctcaccgttcaaccagccgcctcattgaaaagttaaagaaattgaatgcgccaatggggaaaatcgctgtattaggaaatcatgatcatttgaatgatgggcaatattttgtgaatgaagtgtatgaaaacgccaatttcaccttgttggacaatgaatctgtatttggttctgatgagaaaacctcgatgaatatcgtagggatcgatagtgcgagcaaaagcgcccactaccattacgagccaaccttagcagaatggcagattctcttgatccatgaacctgactatgtctctcgagtagacaacattcgtgactatgatctcgttctatccggtcacagccatggaggccagattcgtgtgcccttttatcgtgcgaaaacgaaaggcgccctcaaatacacagatggtctctatcttttggccgcgaacacacttctaagtgtgtccaatggtgtggggaccacggcgattccagcgcgctttgctgtgccgccagaaatcacatactatcatctcgtgcccgccgaaaaacatgctgtagcctaaaacaagctcttaagtgatcctcctatctcgtttggatagttaggatacttaagagcttgttttcgttattggcgtaatccgttatagatcgtctccaaattccacttcatcatcgcataataactatcgccatcttgtccaggttcagcgatggagtctgtaaagacagtgccgtagatcggaatacctgaatcccgagacacgctttgcattgggcgagtattaacgctactctcgacaaacaatgaaggaactgccgatgcttgcaattggtcgactaaattcttgatctgagcaggcgttccttcttcttcggtgttgatttcccagatataagcggatggcacaccataggccttcgaaaagtacttaaaggcgccttcacttgtcacgatcaatttcttttcttcaggaattgaagcaaaattatctttcgcttgttggtctaattcggaaagctgctgcagatagtgttccaagttttcttgatagaccccctgatttgcaggatctttcttactcaattgttgggcgatatttcgcgcatagatcatcccattttccaaattaagccatgcatgaggatctgcctttgtatgatcagcatcatccgatagatacaggacttctacgccatcactgacggcaaaataatcttcacccgcttttttgttggcgttgttcattaatttagtaaaccagccgttgccgcccgtctctaaattcaagccattataaaatagaatgtctgcatcagtggctttttggacatcttctgacagtggttcatattcatgagggtcacgccctacaggaacgatgctgtggagattgattttgtccccggcgatgtttttggtcatatctgctaaaatcgaattggtcactacaacatttaatttgtcatcaacggttgccgcctgctctgcttgctgataaatcaagaatcctcctgcaacagcggcagcagaaaccattgccgtggtcagccagcgtttggcaggactcgtttgttgttttggtgaaaagagaaatcctaagacaaacaaaacagctgcagtgaggacaatgcttgatccggctgcaatattaaaggaataaccgataaataacccaatcacagaagaagcaccgcctagaatccctgcaatcaccatcatatggctaaggcgttttgtaaataaataagcagttgctgctggcgtaaccagcaaagctacaatcaagatcgtaccgacactttgcatcgcagtaacggaaactagtgtcaaaagcagcatcaacaagtaatgatatacctgtacattcattccaaaagctttcgccatcatcggatcaaaagaagtgatcagcaatggccgaaagaagatcataatcagtgcaatgaccagtaaagcaatcgcaatcgtgacccatttatccccctcttggactgcgagcacatttccgaataagatatgaaacaaatccgtagaactgttagctacgccaatcaagatcactcccaaagctaaaaaggagctgaaggtgatcccgatcgccgtatcacttttgatcaaactattgttagaaatataggtgataatgatcgatgcaagaacaccaaagaaaattgctccaacaaaaaagttcacccctaaaatataggataatgctactccgggaagtacggcgtgagaaatggcatctcccatcaatgacattccccgcaaaataataaaacaaccaatcacccctgcaacaacaccgatcgctacggcggtgatcaaggcattttgcagaaaatggtaatgaactaatccatcaataaactgactaatcatcttaagcccctcctttcacgatgatcgtatcgccgaatgtttctttcaaatttgtttcagtaaaaacagtcgtcgtcggaccatatgcgattaaatgctgattcatcatcactagttcatcgaagtattcagtcactttgcctaaatcatgatgaacaataaaaattgtctttccttgttggcgaaattcacgcagaagtcctacaataattgcttcactcatcgcatcgattcctacaaatggttcatctaaaaaaatgaattccgcttcttgcagtaatgtgcgagcaatcaatactctttggaactgaccgccagatagttcgccgatctgccgttcagcaaagtcagccatttggacagactccaatgcagcggcgactttctgccaatctttggccgttattcgttgaaacagagaaagctgcggatagagtcctaatgacaccacttcttttactgtaatcggaaatgtataatcgactgcagtcttttgttccacgtaggctatctttttttggaacttattgagtgccattccattcgatgtgacatgtccttcagaagggatcagctgcagtgcagctttgatgaaggtagattttcccgcaccattcggtccgatgatccctacaatggccggcttatcaacacagaaagatactccagagacagcttgatttttcccatcatagctggcggaaatttttgaaaatgtgatcatagtttgcgctcctttacatttatattaaagtatcgtttatttattttttaggcatgcctaatttatttccaattataccgattctcctgttgaatgcaagggattttttacacaaataaaatccaattagaaaaaataaagtgtcccttcaactaccttgcccctagcagatcgttttattcattcgccgttacttttagtgtgaccaaacaaaaaaaagtttccactcctttgagggaaactttttaaaagaaaactttctaatcagcattcgctgtttttttcaaaatttgtgatgaagaatcaacctggagtaccaattgtcggcaatatactcgtcactactcagacactacgttgactggttgattctctaagaaatgcttataatttgagacagcgatagctagcaatcgttgccgggtctctaatggtgcccacgcaatatgcggcgtcaaatagcagttaggcgcatgcaacaatggattgtcagccgtgattggttctttcgaaacgacatcagctgccagagcagcaacttgtccagctgacaacgcttctgctactgcttgttcatctagtaatccaccgcgagcagtgttgatcaagataacatcctttttcatttgagacaatgcacgggcgtcaatcatcctctcagtatcgggaaattgcggtacatggagactgatcacatctgcttgttgaaagagtctctccaacgaaacttgttctgcccattcagcctgcggcgtttttggtcgatgattgtaatagatgaccttcatttgaaacgcatgagcaatttcagcgactgcctgagcaatcgcaccatagccgatcaaaccgatcgtcttgttggcaatttcagtcagtggcgtttgccaataagagaaatcgggactgttttgccaatctccttgatggacggattggttgtgccgccctacttgattcgttacctcaagtaataaagcaaatgtagcttgcgctactgaattcgtactatagctgggaatatttgtgacggtaatcccttgagatgctgcagcttgtaaatccacaacattgtagccagttgccagcacgccgatataatcgatgttagggcatgcttgtagtatttcctttgtaaggggcgttttgttcgtaaaaacagccgatgctttgccgattcgctcaatgatctccttcgtatctgtataggaagtgcgatcataaatcgtgatttcccctaatccagctaatggctgccaatctaaatctcctggattcaacgcatagccatctaaaacaacaattttcatttttttgctcctctctgttggaaataaaagactggaatccctaaacaggtgatcaaaataccgatcaatgcaagcacaggggccgtaaggatcgtcattattaaaatgaatccgccccctaaaagagcaatgatcggtgtgatcgggtacaacggaaccttgtatggacgattgagctcaggtgctttttttcttaacaagatcacacctacaaacaataatacactaaaaaaccacatcacaaaaatcaacatatccgttaagagatcaaaactacccaacaacatcattaaacacgcaattgctaattggaaaaaaaccgccgcataaggagccttggttttatttgtcaatttaacaaaggtcgaactgaatggaacttcattctcgagtgccatggcataaggcacccgcaatccggtcatcgtatacccattgagtgcgccataaactgaaatcaaaataccaatcgtcactagtttgcccccaaaatcaccaaataactgcaatgcggtttctgaagcactatttaagtttccagcaatctgttctaagggcaatgttttcaagaaaacaagattgatcaggagataaaccaaggttacaaaacttaatccaaagataatcgctttcggaagatctttttccggccgcttcatttcaccagcaatattcccaacacctaaccagccatcataagcgaagagagtcgctagtaatgcactgctgattcctgcaatgatcgaaccatcacttgttgtagaaaaattgattaccgagactgacactcgtcctggtgtcatcaatcccactaaaacgatcaatgcgatgggaatcaatttgattgataatgtaaatgactgtacgcctgcggcggtttttgtccctaatagattgaacaaactaacactggtaccggtgatcaacgatagcggcaagagataacttgcgggcaaatgaaacagattcaaacactgagtggcaaaaataatactcaacgctgctatattggcagggaaataaataatgctttgagcccatcctagcaagaaagaaggcaatttcccgtaaattcgttcaatgtagcgaataggaccaccagtttctggtattgctgttgctagctccgctaccgttagtccgccacagatcgtcaaacagcccgcaatcaaccacacaagcaatgttaagccagaggattgcgtatgttggaccactgcagccgctttaaagaacaccccggctccaatcacagttcccatgactgtcgaaagtgctccgaaaaaagtgatttctttctttagttgactcttcaaatactcacgctcctttttttgactaaatcaaagtatagcggatagatgctttgttggctagagtgattcgtttggaccacaaaaaaacagctgcttttcaacagctatccctcttatttatttactgttgaaaccaaaacttgtgtacgcctttggtgcattcgtttcactaagaaaactgcaagcaacaagatcaaaggaaagatccccgctcccaaaattccttgctgcaaacctttgtcgctgccttctgccaacaaaccgaccaatgaaggtcccaatgaacaacctaaatcacccgctaaggctaggtaagcaaacattgctgtacctccattacgaatgtattttgtcgttaaactaaaaattcccggccacaatataccgacagcaaatccactcaatccacaaccgataaagcctagaattgggacacttgataacccgatcagcaaatacgccaccaagcatagcaataagcttgcaaacataaatttccgtagatcgatacgttcgccaaatttcccataatacagacgagcaagtcccatcatgatcgcaaacaacattggtcccgcaagatcaccgaccgttttggacacaccaagtccttgctctgcaaaagtggatgcccattgactaactgattgttcacttgccccggcacagaccatcatgactagaaacagccaaaagcttttcaatgagaacagttcacgattcttcagtcctacttcgccttctgctacgattggtgctaatggaacttgagtaaaaacaaccaaattgaccagcggcaaaatagcccagatcaatgtaagaaatggccaacgagcaataccgaagacaaagaaaaagagtgttgagactaagacgaccccaacatatccccaacaataaaacgaatgcagcatactcatggttttttctttattcggggttggacaagcttcgacgattgggctcactaatacttccagaagtccgccaccaattgcatagaggaagactgccgtcaataaaccggtaaaaggggtcggaaagataagtggaaaaacagccaacccaatcaatcctacagccgcaaaaaaatgcgccgcgacaatcgagatacgataaccaatccgatcgacaaaaaagatcgctgcaaagtccacacccagctgcgttagaaaattaaatgtaaccaaaagcgtgatttgacttagcggaatctgatactgtgtttgaaatgtcaaaaataataaaggtgcaaagttattgatgattgcttgaacaatatacccagcaaagcaagcaatgatcgttcgttgataatttttcatttttacctcctccagatttgtttagtatagcaagagaactttcacaatcgccatggaaaatgctattcaaattgctagagtatgttctcttttttggtgtattatcagttgaaaattgctccctactggtattgcaagtcagatctcaataaagttagtggtgataagtgctagtatcataaaaaaaaacgaatctcccctgccgatttcagcaatctggaaatatcgttttttttttgaaacacaacgattgaagatctctactggctgaagatccttggtcattgtactaattctgtccaaaagttcttttattttgaataagttgtccgaaaaggattatacttgcgcttttcagagacagcagattagttggaatgtgctgccagcattttgactgtggcttcaaaaattggtccaataaagatgatacagagcaatgtaccgataccgacattggcacccaaaccaaagccaatcaagaccatcgctgcatccaagccgatccggatcgtcttttgggtcagcttcgtacgtttataaatcagcgcagttagtgcttctaatgctgctgatccttgatttgaagagacatagatccctgccccaacgccgaacaagatgggggcgatgaaaatcgccaaccaagaatagaatggcaaatgaacaaaaatcttatccataaccggctcaaaaatcccaatcagcaaaccaagaccgatcccattgatataactgccgattccaagctcctggcgatcgaaaatagctacgatcagtaagacgaccagattaaaacatagactggcgatccaaaacggaacagacacatgattcaagattcccagcaaaaatgtactgatcgtatcatacccctgatgggcagtgatcagcaatgaaattgctaacgcaatcaaacacgtacctaacaagatttgccaaatttttttcacgacatcactctcttttccaatttagttttctagactctcttagtgtaccttgccgtttcagagattactactatttcttttatctgtctaaaaaacccttcaagcggtcaatccagtgattcgtaactttgctcatacttctctcgaaattcttttggcgtcagaccattcaatttcttgaacatctttgaaaaataattcgtattattgtatccgatcacatcggcaatctcattaattgtttgtctcgtatgcagcagaagctgctgagcttttttgatccgaataaaattgacgtattgattaaagcttaattccgtttcttttttgaacacttgccccagatagactacactaacatgcagagcttcggcagccgatttaaccgtcagctcttgcgtatagtgctcttcaatcatgccaaccgctttttgaacaatctcagaataacgcttttgctgaggctggtctttggccaactgcaaaatctcgttgaagagctgacgcagtacctggatcgtattcgatgctcgaatccgagtgatgatccgatcataattttctctagtcaaagcagggaactggcggtaaatatcattgaataatagaaaggctacgtaacggacatgctcagggtcagcctgcatcccctcgagacttgaaaagattttgtctaattcatcttgaacggtttttgtatccccgatcgtcaatgctttattgaaagagagaaaaggtagcgcttcgttgcggtctaagatatcgacttgaatgatttgttcattaagcagcaaatccgggtaaaagatctgcagtgattggacttgcttgattttctcataccctttgtataagttttcccattcattgatcgtttcactgaccaccaattgccaatttcctgctagaatcgctgacagttctttgagcagacaccagagacgttgacgttcaccataaaaaacgatcagcaactgattctctcccaatcgtcctggcagtagcaatggctgttctttttcgacaaaaaaacgaaacccattttctaagatttcaggtgtccctgtcagctgtagaatcgtataaggcggatggatgggttgtgtggactgttccaataataagtggtactcactttcatttaattcatcattcagccaaagcaacaagctggattctcgatacaagtcattttgttcatcgattcgttgctgatgtgccagttcctccgcaattgcctgcacactttcatagagttcgaccttgttgactggcttaacgagataatttcggactcctaactgcatgccttgcttcacaaatgcaaattcttggtaaccagataagatgatggaaaaaaaggtattgccttttgcctgtgctttagcgatcatatcaatcccattcatttccggcatgcgaatatcagtgatcagtagatcaatggcttgtgtttctaaatattccaacgcttcagaagcgcttttagctgtgtgaacgacttcaaagcctaattcttgccaaggaatgatcatctttaggccttctagaatcatgtactcatcgtccacaaacatggctttatataaactcatcattcaacatctcctcatcgatcgcaatggaaatcttgaatccgtgatttttttcagattcaacttccatctgataatgatcgccaaacatcccccttaatcgttcatgaacatttttcatgcctatggatgtttgtacgacgactcggtcatctgcaagctcttggcggatcatcgctaattgctctggatctgctccttttccgttgtcccgtacttgcaaaagaatcttgccattttgtcggaaggctttgatactgatggcattatcatttcgctgatagtcgattccatgcacaaaataattttctactaaaggttgcaaagtgaacttaggcaagagcagatgtttcagatcttcttcgatagttacgtgataggcgattttatccggatacctcatttgatacaagtaaacgtatttctcacaaaacgtcacttcttctgccaatgttttgatcttttcctgtgtcgtattgttgcgcaaaagtgccgaaaaagcgtatacgacatccgctaattcttcctgctggcggctcaatgcgtacatccgaatgtattcgagtgtattgtataagaaatgaggattgatctgagcctgcaatgcccgcatatccgcatcccgctgcttgatttccagggtatagatgtcctcaatgtagtcattgatactgcctgtcatttgattgatcgcctcggcgattgtttttaattcttgttgaacccccgtggtatcaatacgctcattaaaatctccgtgactgactttttgggttgcttgaacgatctgtttgacctgctgggtgtaacgcttgaacgtacgatgcaaaatcaatagcagcacaaaaagaatcagcgtaccgcaaccaaaaatcaacaatgtataatttaggacatcccgccaaatcacttgcttatctagtaaaaccagcgtgatttctccgttgatattcccttgtttttttatgtaaaaatcatgggacaatttcggcacgatctctttttgattattggccattgcttgatcgattttgtcgatcatcgcctgattcagattcggtgcatctttatagagacgctgtccactgcttgtgtatatgaaacttttgataccgtgttctctattttcatcactacgattagctaatacgttttcttcattaaataccacaaacacttgtcccattggttgcgcaaaattactcggttgtgcgatcgatcgcgcaaaatataggcgatttttcaattggatctggtcgccccgcagtttctctccgtaaggtctgtctggtgtagcaactaaatattctttgctttcatccaattgaacgatgatttcttcaatgtcaggatgactgctgatcaaacggtaaaggatatttggcagataaatattttgtcctgattgtcgaaacatatcattactataggaaaaataatcggcgatcgataactgtaaatagttgcgcaatgattcaaaggtggcatccgaactggtgaattctcctaatacttcagaaacaatcgtattacgctcttggatatacgtatctaaatacgtgcttgttgcatcgacgagtcgattactcatccgaaaccgatccacacccgtatagacactcaaccctaacatgatcaaaatcgaaattagaatcaacaaggcactataaagttgcatcaattgattgatcaggaagtcacgcttgaaaagggctaagattcgtttattcatattgcagttttccatcgatcaatgcacggtctttccgggaagcggaatggacccataataagatcaaactgaaggtaccaaataaaaacaatcctttcatgctccaagtaaacaccaaaatacctacgagaccaaaaatgactttagcgaaggtgccaaaatttagaaataaactgacaaatgccagtttgatcgtattcaataaagaggtttcataaattgattcaaacaataaactatacaaatacagtaaaaccaagagaccacttactactactagcaaaaagtcgatcatcagccacagtagtccttggatctgactggagagatacaaattatacgctgcgatcgccaacaaaccgaaaaataaataaaaacgggcgttggctcgccaaaagttttgcttccagcagcgaaaggccttcctaaacgtttggtcctcgtaagataagccctcttcttcgatcaaatcactgatggtttgaaatgccggaccaaccccaaacaaaactgcgcccatcattgtaaacaatacgaagaaaagattcagtttaatgaccgcccaaatcagacgaaaggcctttactaatcctccacttgttgtctctttcattcttcctcatcccctcttggtatttgcccgttttattatagcgtttttttgtcacttctcaaaatgcgaatctttactttttctgacgcttatcgccgcttattctatcttattctattatgtacaacaaatgaggagtgacgaaatcattcatcggctactcctcatctgctcctacgcgcagttgctccgcttattttaactaattattttccagattcacggtattcgtcgaattgtttttgcatttcatcacgaactttgtcccaaccagctgttttcaattcttccactagttttggcacattttcttctggatcgatggtccctgttgctagacttgctttataacgattcatgacattggcgatgttggtgatttcagtcttcacactatctgttttaaagttgaaacctagaattggtgattcttcggctttagcaatgttttcgtcacgttctttgatcatttcatcagtgatcgattcttgcgtatacaagatcatattgttcccagtattccatgccgccatgtgagtgtttggtttgtagccatccaacaatttgattttgttatcttgcccttccactttttcccatgcttctccttcaacaccccagacaagtccattcaacaattcagggtcgctgtttaacaaaccaaggaattcgacagctttttctttgtttttagaaacatttgccaccacaaagttcgccatttgggcttgccctgttgatttcaattgtttggtaagcggacgagaaatcaattcgtgaccggcagcattgttcaaaattgtatcgccgtaatccattggtccttgggtttcttcacgcatgaaccaagtatttccttctaatggatagccagtggtattggttgcggcatctgttgggatcaatccttctttataccatttgtgcatcaatttcaagtttgccatttgttcgtcatcttcatatgggttgatgatttttgtagtgtctccgtcaagtttgaccgcaaatggatagtctttccccatgacatagtcatagtttcctgaaatgttgaaggtttgaccaattgcgaagctggcaatattcggttccttctcatggaattttttcaaggcatcttctgcatcagcataagaattgatattgctgatatcaatgtcgtatttatcgagatattgtttgttgaatgtcaatacttgttgcgcatacacgtttccattaacaggaaaggcatacagcttgccatcgatggtgttgcctttgatatatgcttcatctaattgatcataagcttccttagcatattttggtgcgaggtcggtcaaatccgcatatgctcctttttgggcatttgccacaaaattagatgcaaaagagatatcatagttctcgccagaagaaatgatcgtactcattttttgatcccaatcgccccagccaatgtactgtaggtcgatccgtgcattgattttttcctcgatccgtttgttggcgatctccatcaattgatcaaagttctctggtttgtccccgacttgatacatcaacaaagtcgttacgccatccgcactattagaatcagaatccgacgactccccgtttgacccgcaagcagctaagctcaacagcattgctgaagcgaatcctgcaaacattgtttttttccacgatttcatttgttttcctcctatatccttattattctttgacaccgccaattgtcaagccacccacgaaatatcgttggaaaaatgggtaagtaatggcaattggtaatgttgctactacaacgattgccatccgagcagtctcgtttggcaatgcggccaatccaccttgaacttgagcagccataccggtacttttagctaaataatccaagttcgattgaatccgcatcaatagtgcttgtaacggcactagtgaatccttttgaatgtataacaatgcattgaaccaatcattccagtaaccaagtgccgcaaataaactgatcgtagcgattcctggaaccgctaatggtaagacgatcgagatgaaaatcttcatttcgctggcaccatcgatccgagctgactcaataatactgtctggcacagtcttcttgaagaaagtccgcatcactaaaatattgaaaggacctaatgcaatcggtaaaatcaatgcccaaatcgtatcttttaattgaatcaaattaaccattactaggtaattggctaccattcctggggcaaaaagcatcgttaccaatgcaaagagcgtaaagaatcgccgaaatgggaaattggaacgagaaatcacataggcatacagtgaagtcatcgttgcattgatgactgtcccgaagacggtgataaagacggagatcccaaatgcttgaaaaatcttactgctcatggcgccactaaagagatagctataggcggcaaaagaaaattcaccgggccaaaagcggtagccattctcagctagcgaggtttcactcgtcagagaaattgcaattacaaataaaaatggtaagacacaagaaaaggcaaatagcgccaaaacaatattgaaaatcaggttgaccgttggattaaaggaacggacttcgacctttgctactttctttttcattcgtccatcctccttagaataatgctgaatctggttctaatttacgtaccactaagttggcagctaagagcaagcacatacccactacggattgataaagtccggcggcagcagtcatgccaaagtcacctgtggccgtcaagccgttatagatgtaggtatctaaaacggaagaaacttgatacaatgcacctgagttgcgaggaacttggtagaatagaccaaagtcggcccggaagatcccaccaatattcaaaatcaataagacagagatcatcggcaataattgcggcagtgtcacgtttttgatttgctgccatttattggccccgtccaccattgctgcttcataataggtttgatcgatacccatcaccgatgcgtaataaatgatactgttgtagcccaagctcttccagacgttcatgaaaacaaagataaatggccaccattttggatcggcataccagttgattccttcaccacccatgttggtgatccattgattgataattcccttgtcagggctcaaaaaggcatagacaaaataggaaataactacccatgaaagaaaataaggcagcaatgacatggtatgatacactttgaccaatcgcttgttccgcaattcactcatcacgatcgcaaaggcgatggcaaaaaatagattgaatgctagaaacacgatattgtaaagcaatgtatttctagtgatcagccaagcatcatttgatgcaaataaaaatttgaaattatcaaacccgacccacgggctctgttgcagactggcaaaaaatccgtctggtgaaagacgaaaatctttgaatgcaacgacattgacaaatactggaatatagaaaaaaaagatgaaccaaatgacaccgggaagtgccattaagataagtgctttaaattgccacacatttttccaaaatccctttttcttcacatttgatcaactccttctgctataagaataacgctttcattgtgaataattaaggaacaaactaaagataaaaagaaacaaattaaagattttgtcttttctattatcttttgtatgattttccccatcgatcaaaagacaatttttcttcacaaaaaaacaagcagcacgtattgctgcttgttttactttttttattgggcttcttttcctaataacagactgccaataatgccgcttttgttcggcagcccccaagcaacaatgtattctgtgactgtcggtgtttccatgtaaccagccatttgctcagtaaactgatcgtggattttcgtcaaaagatgcggttggttcatcactccgcctcctaatacaattcgatcaggggcaactgtcaaagtgatattcacaagtgcttgcccaatataaaaggcttgtaaatcccaaatctcatgatcttttggcaaatgttgtcctttgatacctgtccgtgcttccagtgagggaccagctgctaacccttccagacaatctttgtgatagggacaggtgccgacataatcgtcatgcggatgccgtttcacaaaagtgtgcccaacttccggatgacctgcgccttggaagatttcctcattgattacgattccagctccaataccagtgccaatagttagatacacgcagctgcgcattccttgtgctgcaccttgtttcagttccccaaaagccgcagcattgacatctgtcgtccaggcaaaacgagtggcgggataccgttttttcaaagtccctaaaaaatcaaactgctgccagccttttttgggtgttgctaagattttgccatacgtttcttgttgaggatcgatcccaatcggaccaaatgatcctacccccatggtggctaaggtgtacttatcaaaaaaagcaaaaatagcagccatcgtttcctctggtgtcgtcgtaggtagtgagcactcatcaatgatagatcgttcatcagcgaccgcacaattcatttttgttccaccggcttcaattgcaccataaaacatctttttcactccttcaaaccgattgttcgaatttcataagcagccagtgtttctccaactgattgaggctgttcttcttccaacaaattaagcaggcaacgatctgtcttttctttcttcgcgacaaaaggtgttgctgtatcggcaagattgtaccctcttagaacgagcaagtcatcttggcgacgacgtttaagagccgtgatcgccactgtagcgccattggcttccacgaattgtgactgtttttctaatagacctgagtggatggctgtttgccgggcgatccaaggcacttgagctgcttgtgcttgtcgataggtttcgtagcgttcgttgtcttgagcatgcaactcaatcccgtactcaaacgtatgcttaccgatacattgcgcttctggtgttgggaaatagccccaatcgccaagttctcctgtgcatcgtaacaatgtcaaacaaattttgtcttctacgatctcgtattcatttaatccagtattggaaactgtgacgccgaaatcttcctcatgtaaattaacaaatgcgtgttgatgctgcggatttgtcggattttgccaatggctagagacttgattcggccttctaactgcttcatagatactatcagcttcatgttgatccgtatggatacccgtagggaaaagcgcccgtaaccggtggtctttgctttggttgttcactgtcgttttaaaactgattcgtttactgttgcagtccaagcgaatttctgtttccaaggtaaatggcactgtttgttgcgccctttgtgctttacggaaacggaaatcgacgactgctttttgttcttcaagtaattgctcatcagccgatactggaatttgcatcatctgcgttactttaacgacgccataaagagcagaatttgcgatgacctcaatttgatgaggaaaagctgttgagtaaatggcgcagtccccttcaggttgtttgaaaatatactcattgccgatatcgccaacatcttcaaaaaccaataaatccgtcaattctttcccggttgctttttctttgatggtcagactgccgtttgaagtgatcgttgcttggacaaacgcgttttctaaaacacgaccatctgctgaaacgattttttctgtcgtagatgctacttgtggcttgtcagcctcaatcagtgcaaaggtctgccatgaaaattccggcatttgatccacttggacttgtacattgacaaaacgcttcataaaaggaatccgaaaagcgtctttcggtaattcatagtcaaaaagcacttcttcttcgctgatttttgccggtaagatctttccttcagaatcaatgatttggtaagaacctttaggctgttgctgcaactcttgatataaccggctaggaagcccttctcggaatgttttccggctcagttctacttccacttcaacgatgcccgaacgtgtcgtccctgaggtattaaagactacaaatggtcggctttcttttggaaaagcggaagtatcgatggcatttagcaactgtgctactgcttcatcagcgacatatttgccgatttcattggctttttcaaaccgcggcatcatctcccgatgcacttcgtccaccgaacagccacaaatactgtcatgaggatgattttgcatcaacagtttccaagcgtggtccagcacatcgtggggatacttcttcgttacctcatacgccatcgttgctaatggttcagccacattttccaattgacgtgagacgcgcgtattccattgtttcaaataaacccgcgaggaggccgtgttggctagcgtataccagccgtctgtctcttgacttgtcaattcgccgctcacggtcccaaggtctgctggcaaatccgcttgaactgctgcaaggtattctgtgaacccagcatgcttgaattcataatcagggaacaattcattcgctaagcggatcgcttcactgatatttttttggacaggctgatgatccaccccattcatcatcaagtaatgatttgtcgaaccaaatttctcaacatcttgcaatttttgagtccaaaactggtgtgcttcttcccgatcaaccggaatctcattgccattggaataccagttggcaaaaagtagaccaaagatctcactgccatctggacctcgccaattcatttctgagtattgggaggtaaactgatcatccggtaaaacttcgttatcaaacccgattggcttaactcctcgaccaaaagctgcactgtgtaagttggcttgcttcatcatttgcggtgtttggcccatattcccgaatgtatccgggaaatagcccagcatgacgggtgttccccattttttgctttcagccatcccaatcaacatgttgcgggtattggactctgaactaatcaaaaagtcatcttgaagaatataaaagggaccaatttgtaattttccttgatcgattgctcgtttgaccgctgcccgcttttccggacgaacttccaaataatcatctaggataatggtctgaccatctaaatgaaaactgtggaactcaggatctttctcaaacaattccaatagatcatccatcaattcaatcaagcgcatatggtgttgctcataaggcatataccactcacgatcccaatgactatgagatacgatataaatttgttttttcattgtctaactcctctcgtttttgccggagatgcttatttttctactcgaatatcaaagtaatccatgacaagctcacaaaacatcatattggcccatgagaaccattcccgggtatatttcgtcggatcatccacatcgaatccttcatgcatcaaatgggtgccagcatcggttgcaactaattgattgaggattcgttctttctccgccttatctggtgtcgtcatgccttccattgccatcgcgatcggccacacatagttttctggtgtatgagagcttccgattcccttcgcatattttccttcatagaagtaaggattttcggaactgagcaacgttttgcgtgtggctaaataggtttcatcttgatctgatccgtaacctaaataaggggcggcaaccaaattcggtacgttgctatcatccatcacagtggcattgccttgaccatcgacttcataggcatagatcgtttgacccgcttgattggtggttttgccaaacgcatcgatccctgcttggatctctgattggagctgttttgcttgagtaacaatcgctggttcattcaagatagaactaaaaatctcaacaatgtagcctaaaaccactacagcaaacatattcgaaggaaccagataaccataagcacatgcatcgtcactgggacgaaatcccgaccaggtcataccagttggtacgacaggcgctcctttcccgtcattgatcaaggtatcttctttacgccatgtttctctctcaaagcgataaggagattcttgatgattttgttccgtggcaaaaacatgaagggcttttttgataccgctcacaaaatcgtcattaaactgatctgttctgccagtattcttatacaacaggtacgccaattgaatgggataacacaaagaatcgatctcatattttcgttcccagatccaatcattcatctctgtcaaatcgctttgatgcccggcgccatttgctgcttcattaaaggcattggcataagggtcgatattgatataaaaaaattgcttcttgactaatccgctgatcatcgctgccagctcttcatcttccttggcaattactaaataaggccgtacctgcgcggttgagtctcgcaaccacatcgccggaatgtcccctgtcagtagaaatgttgtgccatcttcatggcgtttgaccgttgtcaacaatgtgttagcaaaagcagcattgaagttttttgcccaatccgcatgttcacttccgcaacgttcggttatttcctgcataaagtttgcaactgaatttggtatttcttgataagccatttggtcaccatcctaaatttgatatatcattttacgaattcagtataacgatgtttctcagcattgtctagttcaatttgacaaaactctattttcaattttgaacgaatatgctatcctgtgaatatgatatatcaaaaaaggagatcaactcatgaaagaaccattatacaaaaaaatttatcacgaattgtatgagcagattcaaagcggtgagttagctccggaaagccgtgtccctactgaaaaggaattgtcagagaaataccaagtgagtcgcatcacctccaagcgagccttaactgaattggaacaaaatcagctgatctatcgtattcaaggaagtggcagttttgttcgtagaccaatccaaccacaatcaaaggggaaagtgctgtttattttacccttcgcgaatgacctttcccttggcaattttacggaaggcatctatccagtcatgcaggaacagggattcgaattgatgctgacacctgttgattatctggagcaaaccacggccgaagctttgacagaagaatttgacggaatgatctactacgctaacaacacgaattcaaattatgatctgcttttcgaactggcttcacaagggttccctgtcgtcacacttgataaaacactgcatgagttctcattcccagctgttttggcagacaactttgaaggaggacagttagcgactgaacatcttttggcacaaggtcatcaacgcattggctatatttttggtgaacgtcaccatccacagtctgtccgccaacgttatctaggctatgtggatcaattaaaaaagcaacagtcgtcttttcgaacaaaacttgatgatcctcaggcacttttgtcatcagctgttagttatattcaagagaatcagttgactggggctgtctgcgagaatgatcttgtcgccatcgaattgatgcgccaattgaaacaagttggggttcaggttccaaaagagtttgctgtgatcggcttcgatgacattcaagcggctgcattggtggatccacctctcagcactgtaaaacaaaattttgccgagttgggtcgtttggctggtacaaaattagtacagttgattcagtcaactgctgccgacttatctccgctcgccaaagaagatgagtctgcaacagcgaatcagaaagtcgcagtcactttagttgtcagagattcaacaattgaccaaaaacaatgacataaaggagcaaacaaaatgaaagtaacaatgatcgatacgaggcatgggacagataatcaatacagcttttctcacggcaactgtctcccttatacaggggttccgtttggcatgaactattttgcccctcaaacaagcgaccaacgtggaagttggtggttccatcctgaagaccgtacgtttcaaggatttcgactgacccatcagccaagcccttggatgggcgattttagtcaccttacttttttgcctattaatgggaagttatcagaaaatacactatttcatgcccaaagttcctatcgtccagaagaaagtgtcttcaatccagcttgtttacaagtgaaaagccaacgctaccaactcactacaacattgatcccaagcatgtacggaggcattctggctctagatggtgcagtgactgatcctggcttaggaatctctttgcctgggcgctatcagctgcagcaagtcgacgaacagaccgtcaaaggacaggtcatcaattactctggttgtgaagacaatgactttgcttttcacttcatcttgcgttttgaaacagctgttcatgcgattgaaggggaattatcaggagaaaatggctttgtggtgattcgttttgaagaaaaaaatcagcaaacgatccgttttgggacatcctttttaagttctcagcaagcctttctgaatctcagccgtgagttggatcaaacaacaactgactacttgtctaatgcgcagcaatcatgggaaaattacttgaatcgaatagatatcaagcaccacgatccaaaacaagtttcaactttttatcataatttttatcggttgtttttattcccacagactttttatgaacgagatcaatctggtcaaaaaatccattacgatacacttgccaagaccatcaaaccaggaccgctttatacaaacaatggtttctgggatacttacaaaacagtctacccactcttttctctgattgcggtcgagcagctagaagatatgttggaaggatttttgaacagctttaaagaaagcggattcttgccaaaatggttatcacctgatgagcgagggctgatgccaggtacattgatcgatgctgtgatcgctgatgcctgcgtcaaaggaattcgacctgacttgatgccagagttcttaacagctatgaagaaagcagcctccattcagagtccaaatccaaattacggccggcaaggaactgccgattacttgaaatacggctatgttcctagtgagtaccatgaatctgtcaatcatacccttgattattgttacagtgatttttgcattgcccaagtggcaagttctctggctgaccctgaagcaaactactatcagcagcaagcaaaaaactatttagcgatctttgattcagaaacaggctttatgcgagcaaaagacaaagccggtgattttcggacggattttgattcctatcgttggggtcgtgattatgcagaagggagtgcgtggcaaagtagctttgctgtgttccatgattttgctggcctgatcgcagctcatggcggcaaacaatcctttgaacaaaaactggtggatttgtgcaatcaagctccccattatactaccgagggctacggttttgagattcatgaaatgagtgaaatggcggctttggattttggtcagttagctatctcgaatcagcctagtttccactatccttatctctttagttacattggcaaaccagaaatggcacaaccattgattaaacaattgctgacccaatgtttcgatgattctccaaaagggtatcctggagatgaggacaatggcagcatgtccggttggtatgtttttaacgcattaggtttctatcctgtcactcctggtaccggcgaatacgttttggggatgcctttgcttgacgaagcgacactctttttgtcgaatggaaaagaacttaaaatccacagcacgccaaatcagccgcagcagcaatttatcgacaatgtgactctaaatggtaaacaacactctcggttgttctttactcatgatgaactgatcgctggttcgacgatccgctatactctaggcatcgttccccgcagtaagacttggtcagcggaagcttatccttatagtctgtcgcatagtcaagagtcgaatgaagaccataatgaaaatcggtaggtaccttttttaaagaacgagcaatacggaaagaaaaaaaggttgcgacataaggatcaaccaaactaaactatctgaatgacagtaattgaattgcgcgaggtatttcccacttatggagataccctgctgaccgccggacaattacaacaaccttcagatagtcagtttgttgaagaacttatgttgcagaccttttttgctggttgctcttttgcagctatcaatcaatgaaccgatagcctaaatcgattagatcaatgattagattcctgtaacgccaaaatcagttcaatggttcgcagcacaccattgtcatcattggagcgggtcacaaaagctgcagcttccttgatttcctcaaaagcatttttcattgcaaagctgtaggtgccagcggccattaattcgctgtcattcaatccatccccaaagaccatcgtttcttggggtctcactgccagcaaattctgtaattgggctactgttgtccctttatggacaccttgattagtgatatcgatccacgcagcttatgaagcaacgatgtaggcatctgctgcaaaagaagacagctgcttgacgctatcgaaacaacgtaacttaggatcatataccgtcactttcacgaagtcttcttggatctcactataactggtgaccgttttgacaacacgataagaacctcgaacccgggctgccttttcttccgttgtcgtttccttgatataagcggctgttggggtacaggcaatgatcacatggtcatctgctattttttctaatcgttggatcaaacgctgccccaatgcatttggaagtaaggattcaaacacatagcctccttgatgtttgattcgtgtggcactatcccctaatatccagattttcgccgcttgatccccaaacagttcttctacgcgctcgcactgcttgccagtacaagcggcaaaggctatccctctttgttccatcatctggctgactttatcaaaataggtttgatcaaaggccccctggctatttaaaaatgttccatctaaatctgtaatgatcagtttgatcatctcattccacatccttcgccgcgtcgctgccgctctatttatttaactaccttaattaaatatacttatttaactgaaaaccgtcaatcgctttaggaactttctttacattgctgcgcttcatcgctatacttaataaactaggttcactaaaggaggcaataacatgtctgccaataaaaacttgattcgccaccagaatattcaagtcgtcttaaaagaattgtttcaaaaagggacctcttttgcatccgatctggtaaaagagaccggcatcagcatggtgacgatcaattctttattaaaagatcttgtttcagagggaatggtaacgaaaggcaagctcgttcaaagagagattgggcgcccagctatcgaatattgctttaactataagtactcaaaatcattgttgctcgctttgatagaagtaaatcgtcaattggagttgagaagctaccacatcgatttgaaaggaacgatcttagctgcgcagcaccaagctttttccgagatcacaccgacagcctttcagaatcttgtccgacaatctatcgaagctttcgctgatgtcgaacagatcgctgtgctgttgccaggaaaaatcagtgagggtgtcgtgacttccagctggtatgaaaagtttgatggatgggatcttgaccagttattcaaggagattacgcctattccttgcttttatcaaaatgatgcccatttgctgaccgttggccattgtatcgccaagcagatttctctctcggaaaacatcgtaggtatttataatcccgaaaacagcatgccagggatcacgttgatcttcaatgcttctctgttagaaggccaaaatgcgcttgctggagaagcaaaatacttaccaggctttatcgacaaaggtgctccaaaaagtactcaagaattggtggcccgcttatctgctttagtgcctttttataatgctgcttttgctcctgatcgctttgtttttgccagtacagcagcaatagaagaagacttgctagcggctatcactcacgacccttttattaccaaacagccgaatcatcctgtatatacctttgttcacgacttcgaccaagccatgatcttgggtatgcactggctgcttttccgcaataccccctacgatctatcttgctaaacctttccgttgggcattgggagttgcgccaaaaaaacgaacgagtagatctctcctttttgcaggcgaaaagttacgccaaatcaggggatcaccgttcgttttttgtttacgcaacagtaatttcgatcaaattcccttcaggatcttggatcaccgcttcataataaccatcccctgttgtgcggggaccgctcagcagaggaaagccatctgagacaaaacgttgggcataagcatccacttccgcttggcttttcagagccatcgctaagtgcgtgtaacccagtgtatctgttccaccagggtgaaggtgctgctttgtcgttaattcgatacgactgccagaatcaaaacgcaaaaaataagattgaaacccagtcttggtattgtgatatttttcagaacgttgggcaccaaaatacgtttcataaaattcggccattttttctagatcacgaacccaaatggcaatgtgttccacaaacattgtatccctcttttcgcttttttatgaaaagaatccactttacttgtcctttaatcatgcacatccaaattcttctcttattcattgtatcgaagtttcttctttccagcaattttattcctatcacagagcaatcctctttcttcttatttcctcatattttaagccattacttgaatggtttttctgaaaccagtcgcaatagttgcagttcctaaaaattttctctaaagtgaaagaaaataagtcatcgatcaaaaaagattctccagtttgcgaaggaggaatgaaaatgaacatcgcaatcatcggtgctggaccacgaggactgtcactatgtgaaaggttgattgctcaagcaagtatcaatcagcagtctctatctctcacattgattgatccctatccccctggaggcgctatttggcaaacgaatcaaccgcaaagtttgctactcaattctgtgaccagtcaagtcaccctttttactgacgaaacgctagaaactggtggcccgatcaaccccggtcccagtctttacgaatgggcaaaaaaagatggtaggaattttgctaaaaaaaatcagccctcactggtatcagaaattgacaagttggatcctgacggtcattgttctcgcgcattatacgggctgtatcagaaatggttttatcagcaattgattgaaacattgcccccattcatcacattcacgtatttgcaggaaaacgccatcggcctaataccgaaacaaacgcactatttactaaaaacagacaggcactctcttcaatcggaccgagtgattctagcagttgggcatcatcaagtctcgctcactgaagaagaagatcgattaaacgaattcgcccgccaaaaaggctttttgtattctccgcctcagaatgcagcggatgtcgattttaataaagttaaaggcggagaacacgttattctccgaggtctaggattggcgttctttgattatgtcacccgtttgaccactgatcgcggcggtgtctttattggttctgatcgccttcgctacattccttctggcaatgaaccaacaatcattgccggatcaggaagaggtttgccataccacgcacgaggagccaatcagaagcatccaacagaacagattctgcctcgcttcttgacaacggaacgactccgctcttggcaagcgaaagggcaagatcagtccactgagtttttcttttatttgcagaaagaaatggaacttgtttattatcaacgctggctgtctcaagagtctgaagatgatcaagcggcttttactgaacaatttgtccgccaaaatggcgccgccgatgttttgacagacttccaaattcctcgccaaaattggttggactggcgctatatcttcgatccttacaaaagaaaagagagccaatcgattcgcgactttctgttgacctatcttacttgggatgttacagaagcggccaaaggaaatttaacaagtccgatcagtagtatgtttgaattgttaaaagatttgcgtgatccggttcgctttatgcttgatcagcaattgttttcgccaaaagcattaaaagaaaaattctggcagtctttcgttccattgaacgcctttttatcgattggccccccacttcagcgcattcgtgaattgatcgcactgatcgaagcggatatcgtcacgattcttggtccaaagatgatcgttgaaggaagcggcacctttgtggcttattcagccagctatccccaacaacgatacgccgctaagcaggtattggaagctcggattcaatcgacggatattcgtcgtaccgctaatccattgttaagacaattactagctgatggcattgccagtcctcataagttatacattcctaaggaggctccgttttacacaggtgccattgcgcttgatccggccacaagccagttgcttgatccaaatgatcagattcaagaaggactttactgttttggtatcccaacagaaggcattcactggctaaccgccgccacagcacaaccgggaaccaatgcttttaatttacgacaagcagatcagattgctgcccattgcttgactagttctcttcttggggataggcgctgccttcaataaattgcgattgcaaataaaaaccgatacaataaaagaaaaggctcaaggaggttgaaaaatggcagatgaactacaaaagatcgatgcgttgatcaatgaagtcgagaaagtgattttaggaaaacgtgatgtgatccaattaactgtggcggcattattggcaggtggtcacgttttgtttgaagatattcccggagtagggaaaacgatgctagtcaaatcattggcaaaagccatccaaagcgactataagcgtgttcagtttaccccagatcttttgcccaatgatatcttaggtgtatcgatcttcaattcagaaaaccagcaatttgaatttcgaccgggacctatctttacttctgtgttattagcagatgaaatcaatcgcacaacacttcgtacacaagcagcattattggaagcaatgtctgagaatcacgtgaccatcgataatcaaacctacgcgctaagccctcacttctttgtgttggcgactcaaaacccaatcgaatatgaaggaacctatcctttgccggaagcacaactggatcgttttttgtttcgattacacattggctaccctgcttttcaagatgagcttgctttactgattggacaacgccagcaatccctcaatcaaattcagacaatattgacctcgcaggaagttaccgcattgaaacaaatggtcgatcaagttttcgtggacaatcaagttgctcgctatgcgctgcagctggtccaagctagccgcaaccataatgccattgatttaggcatcagccctcgtggcggcattgcctttttgaaaggggcaaaagcattggctttgaccgaaggaagaacctatgtgacaccgcaagacttgcaacgaattttgccagccgtttttggtcatcgcttattattaaaaggcgggattactgccagccaggaaagtctctctgagatcatgaagcaaatgatccaacgcgttcctgtaccagtgaggcgctgatgatgagcaaacagcggttattgggaaaatatctggtattttttgttacttattttcttttactaagctattgtatcgttttcaataatgaagcaggttggagtctcctcttttttgttactttattggtactagcagacttgttattcattctgccttcccttaataaaatccaagtgactcttgaagaatcgatccaaacacaaataaacaaagaaacgcctttgccgctgcaagttttcaagtatcggccaacgctgttgccaatcccaaagctgtctttgctctttcaaaatcaggaacagacgctcactttttatcggggcgaatccatccgcttagaggtgctgtggcttcctaccgctcgaggagcatataatggactgccattgaccctcacaagtcaggaactttggggattcttcagaaaaaggcggcaaatgaaaatccaacaagaaatcctcattttgccagaatatcgacccgaggtcctatccttgatgacactttttgaaaaaaagccgcgaaaatatacttacggggaatcaaatttcaccattcgaaactaccgtaactatcagcaaggggattcattaaagcatattgactggaagctctccagtaaacagcaagaactgatttatcgagaacacgaaacggaacaacaacaggagttgactttgttgttttggggtgaatctcaccctgcttttgaagacacattggcgatcttcttttcgctccaaaatctcttgcttaaaaagatgccttttcagcaactattgatcggcgaggacctggattctccttatcaaatccatgctggagctttcgcagcgattcagccatttatcacagtcccagaaccattgcccaaaatctcagggcgtcaggtgattatcatcacaccggctgtctcgcaatccttagaagactatctggaatccttgacgccaagcaacatgctgcaagtttatacgtatcatgacctgatccaacgactgtcgaacaaagaggtgtctgaatgaatcctttgatcaaaaaagccataatcggagctctgacttacattgcgatcattttgacggtgctgccgtttttagcagtctaccacttggggcaccaaactacgttgcttctgtacgcctttctgatttgctttgtgagtattttaagtcctcgtcttcgctacagtctgcctttttacatcgtaggttggtttgtcactctttaccgcttttttccttatggtgaaggattttccttcacttggttccaaagatatttttatgatttgcaaacagctctcagcgagattctggctggcaaagtcggttatatcactgaacttgttgcagtgaccattatcgtcaccggcattcttctgtttgctgtgttctcgatctacatccagcatttttatattgtctacggtgcaatgtgtctctatctgctgactgtcgtgatttttaatgatttcaatctaacgtggcatttgttgggggtgtgtttttgcggagttctttgcagcctgatcaaaacccaacagctgaaaacagtacgagaatggtcgttctggctggggctcaccctgctatgttcgttgctgttggttggagcaacactgctgccaagaaccgcgattcgcgatcgcttggtagcagctaccactggtatacgcacacaagcgaatcaacgcggcttttatcagtttatcgaagaacatggtgcacctagcgggtcccgtacaggctttagcgaaaatgatcggcaattaggcggtcccttattagacgatgataccgtgttatttacagcccaacaagatacccgccattattggcgagtagaaagcaaagatttttattctggcaagggttggatcaacacgatacgggaagaagatctgcgaacagtgcctgattccctgcggattgcagatgataattatcaacaagattatcttaaagaagaaacagtccagctctatttgcagaatcagggagattatttgccattaccttatggaagcaatcacctcactattgaagaaggagcctctggttttattgtggatgatgcggttcaacgagtcgatctaatggagccgcaacaacagattgaagtttcactggcttggcagccagcggactatgccgctgaaacattgcaatccttgccgctgcaacagccagatactcctgttgactatacacaattaccagagaaccttcctgcacggattcggcagcttgcgcgctcaatcacagaagatcaaagtaccatcttcgaacaagtcacagctattgaaaatcacttgaaaaattcaattgaattccgttattcaaaaacggatgccgtctatccagcagaagaacaagactatgtcgatcaatttttgtttgaatcaaaagttggctattgtgataatttctcgactgcgatggtggtattattacgaacgctcgatattccggcgcgctgggtcaagggtttttcgccaggagatgctcaaactgaaaatggcctgacaacatttaccgtgagaaaccgcaacgcgcattcgtgggcggaagtctattttgccggttttggctgggtaccgtttgagccgacgccgaactttcaaaatcctgatcgtcccgaattgcaaacaacaactgtctcttctgaagtattacctgaaacgagcagttctagtcgcgagtcttctaccagcagcagtagtgagaccagcagttccacaacaatgacggcaactgttgcgccagcagaagaacaccttttctcacctgaaacatggcaatggatccgttcttttctgcaaggtatcgcatgcttggttttcttgggattactgtatcttttgcgccgctactttttccgaattcgcatctggttgattgctcgctttcgctccgaaccattaccaaccgcctatcctgtcttgatgaaacaagcagcaaaagttcttttccatgctgattcggaacctcttagtgagtacgccagccgattggaagctgtttatcctattttccacgggagttttatccaactgacggcaacctatgaagattatctttacggtgggaaaccaatagacggccaacaacagctgattcttcatgtcgcccagcaaatcagtcaattaaagaaaatcaatcaagtccattaaatgaaagcaagaaaaagaaccgaagacgcagtgctgcatgctgcgccttcggttcttattttgttcatctgattagcgaaaacactcccgcgagtatcatgagttcgtgttgttccctcgagattgtaccgctaaaataatcagttttgtgatttccatcatcaagacagcaccagctgccatagctatgcttaacccaacatggttcattgtaaaggtttctggaatcgcaaagacttcccgaattccaggtagcaatgtcacactataaagcagaccacaaaccacgatcgccagccaaaccattttattcgcaaacaatccagcttgccaagcagtctctgtattggaacgagcaggcaatgtttgtaatgtacggctccagatcaaagttgagaatgccattgcaacacctaactccggcgattgattcatcccgatccattgcgctataatcaccactgccgcaatcaagatcccacgataagtaactgagatcagcgttttaccagaaaagatgccagcatcaggatttctaggttctctttgcatgatagttggttccgctttttccatccctaaagcgatagcaggaagcgaatcattcactaagttgataaacagcaattgcaaggctgtaaatggattgtcccagcccattactaaagcaaacacaatggcgataatcgcgccgaggttaccagcaaaaagataagaaatcgcctttttgatattatcaaacacattgcggccaacttctaccgctcgaataattgaagcaaagttgtcatctgtcaagaccattgctgctgcatcttttgcaacgtccgttccggtccccatcgcaatcccgatatccgcttgcttcaatgctggtgcatcatttacgccatcaccggtcatagcagagattttccctttatcttgccatgctcgcacaatgcggattttattctcaggagagacgcgggcgtagacagtgattttctccaattgattcgtcagttcttcttccgacagtgcatcaagctctgtaccggtcaatgctaagtcaccttcttgcgcaatcccgatctcctgagcaatggccacagccgtcgttttgtggtcaccagtgatcatcactgttttgatgccagctgatttcgcgtctgccacggcttgcttgacttccttccgagggggatcaatcatcgccatcaaaccaacaaagatcaactcttcttcgagatctaaatgcagttcttcgtcttcagacactgtcagcggacgataagcaaaagccaaaacccgcagcgcgcgtttagagaattcttcattttgatgctgcaactgatgtttgatttcctcagtcagtggaacgatttcgtcattgataagaacctttgtacttcttccgatcacaatatccggtcccccttttgtcaaaaggagttgttccgaatcaatggtatgcaatgtggacatcaatttccgatcggaatcaaaaggcaattcttgtaatcgcgggtattgttgacgaatctcacgatacggttgattcaatttttctgtataatcaagaaaggcaatctctgtgggatctcctagtttagctccttcgggactgattgccgcatcatttgcaagcacactgatctcgatcaagcgacgttcaggcaatgtccattcagcaggattctcagaaaattcacccgtctgtccatttggcaaataaaaatcaacgaccgtcattttattttgggtcaatgttcctgttttatctgtacaaacgatactagtagatcctagtgtttcaactgccggcaacttacgaatgatcgcatgttgacgagccatttgtttggtaccgatcgataaaacaatcgtaacgatcgattggagtgcttcaggaatagcagccaccgcaacagcgactgcaaacataaaagcgttgactagatcggcggtcatatcgccagacccatcacctaaaaatagccgagcaacttggacacctaaaataatcaaggaaagaacgaggatcgccaagctcaattttttgctgaagcgatccagcccgcgttgtaatggcgtcttgtgttccactgtgttttctaataaaccagcgacttgcccgatttctgtcacatttcctgtggcagtcacaatgaaacggccacggccgtaagtcacgatcgttccactaaagaccatgttatcgcggtctccaataggcgctgtgcggtcaataaccccaagttctttttcagcaggtgtcgattcaccggtcagcattccttcatcgactttcaatgccccttcttcaatcagacggccatcagcaggtacatagtcccctgcttctagaataacgatatcacccactaccaattcttttgccggtaccgtttgttcctttccatctcggataacatttgcattgggtgccgagaggcttttcaatgcatctaacgatccttctgctttttttgtttggatgacactaacaaccgaattcagtagcaaaacagcaaaaatgacaatcgattcaacatgggcgcccatgatcatctgaacgatagccacgatcagcaaaacgatcaccatcgcatctttgaaggtttctaaaaagagtatcaaacttgattttttgggagcttctttcagctgattcaagccattttctaagcgctttgccgcttcttgctgggacaatccagatggactgctgtttacctcgttcataacctctgtgatttctttttgatacatttcttttgccaatgatttctctccttcatagttgctatcccttgcatgagtccttttttagaaaaaaagagacctaagacaagtggatgcttgtcttaggtctcaccatttcatataataccagaaaactgtcgccagtttacttactgttgatattatcgcagccgaagccactggttactcccctaagggtttatcagaatgtagaatcatcataacgaaattttttgaagatatcaacctttatgcacaaatttgtcttttctcagatatatttttttgaaaaaagcttcttttttctgttacactaatctacagcgtaacaagcgtgacagaggaggaacaataatggaaaccattgatttttttacaagtcacacatcggttagagacttccaaaaaaagtctttatcagcagaaatgaagcaacaacttgtcaaagtagcacaaagcggttcaagttcaaatttcgttcaagcctattcaatcatcgagatcaaagatcctaaaagattagcagaaatcgagaaaatcgccggtgctccccactatatcacacagacgggtgtcttttatctgttcgtagcagatttatataaacaccatcaattgttgcaacaaggaaatttgcctagtgatgggttgtcgaatatggaagcccttctagttgctgtggtagataccacgattgctgctcaaaatatggcagcctttgcagaaacccaaggtctgggaatctgttacattggcggaatccggaatgacttgttccgtatcactgaactcacggagctgcccccgtatacactgccattgtttgggttgactatcggttatcccgcaacgaaaaatgagccgaaagttcgcttaccgcaatccgctgtgttaagtgtcgaccactatcagcccctgaccgaagacctcgttgctcgctacaatgaaactaccgcggactactatgcccatcggagaagcaatcaacaaaaaacggattggcaaaccaaaatgactggctttttccaagaacctcgccgtccggacgtagaaaaatttttgaaaaggcaaggctttttgacacagtaagtacgaaaacaagcagctgctccttgttaccggtcgctagactgtctccatcaaaaaaacacctcatgaagaagttcttcatgaggtgtttcgagttgttttattttgccaaacggtagatggcatctgcataaatcactgccgcgttgaatagatcatccaagctcataaattcgtttgcttggtgcatcgtatctgtgtagcctgggaacatcgccccatatgcgacaccacgttttaataaacggccataagtgccaccgccaatgatttgttcatagcctttttggccagtatgttcttcataaacttcaagcaatgttttcaccaatggatcatcaatcggcacatagtgaggctccatgttgcgctcgttccgagtcactgttgcgccttccatgccaacggttttttcaatgccgatttccagaccttctgcagttaccccttgagggtaacggaaattcaaggcaataaagttgtctgcttgaacacctgattgattagctttaaaagcaaacaaaccagcattcatggttagtttacccattttttcatcttcatgcgccacgcctaatttttcaccataaaaatcttcatggacataagctgccgccgtatggataaattgtcttgcgccgccgccaaaggcaaagttatctaaaaagactgccaagaaagttcccgcattgatcccagactgaggacttgcaccatgggcgcctttaccgactagttcaatggtaacttcttcattttctgtttcgatggtgccagtcactggttgaccttcgacataatcaaaaaaagctttttccatttctaatgcagcttctgtagatggggcagtcaattttgcaaccgcagttcctggtaccatgttttcccgcaaaccagcagtgaattgttgaagttgataagcaccttcgttatttccttggaaatgaagccctaatgttacattccctttttcgccattgatgattgggaattccgcatcgggagagaaaccaaaatcaggtttttcttcatgctcgaaatagtaatccatatcaccccagccgctttcttcatcagatcctacgacaaagcgaatttttttagataatggcaagcctaactctttaatgatcttcattccgtaataagcagccattgaaggacctttatcatcggaagatccgcgagcataaattttattgtctttgatcacaggatcgtagggatctgtcgcccaaccgtcaccagcagggacaacatccatgtggccgaagatccctaatgtttcgtctccttcaccaaattcgatatgtccagcatagttatcgacatttttcacagcgaaaccatcacgttccccataagccaacatgtgcagcaaggcatcacgaggtccaggtccaaacggagcatctgccgttaccttgtcatcttctcgttcactttttactttcaaaagatcaatcaagtcatttagcaaatcgtctttacgcgcttcgacttcttttttccaatcgattgtcatacgattccctccaattcttttctcgccttttatgataacactcttagctgaaaaaaggaaaaaaaattgtgtattttcagacgatatctttcataaaacgagtataataaaagcaataggtttattctagaaaatgagcccagtgaaagaagcagaaaaggagtcattgtatgaagcaactggagcaaactattttagcagcagtgattcgcaaacgccccgtcgaaagtcacaaaggaacctttggccgtgccgtagtgattggcggtaaccaacagtacggaggcgcaatcttgatggcggcacaagccagtgtttatggcggaactggactaaccacggtgatctccgatcctgtcaatcgtacggcgctacatgcgcgactgccagaagcgatgttcgtctcttgggaccagactgagcttatcagcacagtcactgaatctgcggatgtcctattgattggcccaggcatgggggaaggcaaaaccagtttcaatctgttgcaaacagtcgtcgctgcacaaaaaagccatcaatggctagttgttgatgggtcagcgatcaatttagctgcgaaatacccattgacttttccttaccccagtcacgtcgtatttacccctcatcaaatggagtggcaacgattaagcggcattgagatcagtgagcaaacaccggagaaaaacgcagccttccaaaaaaaattagccagtatcgtggtcttaaaaagccatcgcacccagatttatggcacagaaatcgtcgaaaacccattaggaacgccagctatggccactggcggcaccggggataccttagccgggatcattaccagctttttggcacaatttgatcgaaccgaagaaacggtccacgcagcggtttatctccacagtttgattggcgaacatttagctaccgagaactatgttgtcttgccgacacagatcagtgaagcattgcctaaatttatgaaggaccattcgttgcgctgattggcgtaacgaatggtccttttttcttagtgtacttcagaggggtgatatacgatcctgacttcatagggtgccaacgtgattgctcctactagatgttcattggtttccagatcggttactggctgcttcaatactagttgctgttcttcctctgaaaaattcataataaatgaatagtctcgttgcgtcccaactcgcgtttgaatcgacacctcaggaagtgcttcagcaatcgctgttcttctcaatcccaacttttcaatcaacttttgataaaaagcagctaagaaatcactgttcgttcgggcagccaaataatacgaagcccctgcaccgaatggcttcttcgtaaccgcaggcgtgccttgatagaaatctgtctgataatggcttaaaacttctgcatccaacacgtcaatgattgctgaatagtctttggtgacaaatcgctgatcttgaaaatcaatctgattgtgttcgtcttctaaaagtgtttcaagctctaatacctcaatgccaaagagcgcctttaatggttgaggcaatccgccaatataaagcaaatctgtttcattgaccattcctgtgaaatagctggatactagtattccacccttttcaacatagctcgttaattttagcatcgttttttctgtcatcatatatagcattggcgcaatgactaattgataatcagaaaaatcctgctcaggagtcagaatatcaaccggaatgtcttgttcccagaaaacctgataatgctcttgcaacgtttggggataacgtctcgtaggacggccgaatcctcccccgcgcttcaacgcccaattgctttcccagtcaaagagaatcgccacttctttcttgcgagtggttcctttgatttcactgattttttcgagacgagcgccatattcagcaacttctttaaacactcgattgtttgtggaatcatcatgactgacaacggcgccatgaaatttctccgaattgccacgagattggcgccactggaaatacaaggtactatctgacccatgagctaactgctgcatactacttaaaatatggaccccggggcgcttcgatttgtcgtattggtgccaattgacataacttggggtacattccataactaaaaagggttgtttcttcaaagaccaatactgatcatggacataggcagacttcatagcggttgtagcgattgcttcaaagcgattgttccaatcgggataactatcccaactaaccacatccacatactgagaaaacttgccatagtcgattccttccagaggaatgaaatcctgtgtggcatgaccttccgccataaaattcgtcgttactgggatatcaggggttcgttcccgaatagggacaatctcattcaaataaaaatcaatggtctgatcagtgacgaatcgtttccaatccagatccatcccatgaactttatgttctcctaaaggtgatggtggcaagacttgttcccaatcggaatagcgattgccccagaaactcatccaccacgcatgattcaatgcttctaggtttttgtactttttctttaaccagtcacgccaattttcttggcagtattcgcaaaaacattcacccgaatactcattggacatgtgccacatggctagtgccggatggtcgccatagcgttcagctaattttgtgttgatctgccgcactttttcgcgataaattggtgaagaatagcaatgattatggcgaaagccatgggtatgtttttgtccatacgcattggtgcgattgacttccggatatttctgactcaaccactggggacgaccaccgctgggggtagccaaaatgacattgccccccatagcatggatcgcatcaaactgttcatcaagccagtcaaactgatagaccccttctgttggctccaaagcgctccaagcaaacaccccaagtgtgaccgtattgacgtgggctttttgcatatacgccaaatccttctttaggatttccggataatcaagccactgatcgggattatagtccccaccatgcaggaaccgctgatcaaagaaataattcgtcatctttttactcctttttgattgctttgatttgataaacaaatgactggaaatctcctgttacttgcgccgtttggtgattgacagcattgaataagtacggtttgcgcagtccaatttgcttcagaaccttgccagacaactgctcattctccagcagatagcttcgatccagatcaatgaacggtaccggtataaaagcttccgctgcaggatttgcttcagcaagaatccgaaaataggcaatcagtgcttcctcttgatgagagactccccatacaacttcatttttttggctcaaatcggtcattcgatagaaggcgccataagtcagaagttgtcgatgagctttatagaaaatgatttgttctttgattgcttgtttttcagctgctgataaactgaaaagatccagctcgtagcctaatgggccaaacatagccaccgattgccgaaatgccagtgacgtattgcgccccacttgatgattgggacaagcggagacatgattgctgaatgaagacatcggatagccaagtaatgtgccggtttgaatttgtagtcgttccacggcatcgctgtcgtcactcggccaaatctgaggactgtaaaacaagatccctaaatcataacgaccgccgccgccagcacagccttcgatcaaaatctccggaaattctgttaatattttctgataaagggcatagacccctaaaatatagcgatgaaagaattctgtttggggaatcccttcatctgctaaataaggtgaataagcttctgtgatattccgattcatgtcccacttgatataatcaagatccgtttcgacgatgacttttttgatcgcagcaaagattgcctccacgactgccggattggcaaaatctaagacatactggccgcgccccacagagatgcgttcataaggatgtcggaccacccaatcgggatgtttttgataaaactggctgtcaggagagaccatttccggttcaaaccaaacgcctaactgcaaccctagatcgtggatttgttttgcaaaatgaccgatgccattaggaaatttcgctggatctggcacccaatcccctaaagaactgcgatcgttgtctcttttaccaaaccagccatcatctaagacgaagcattccattcctaatgcctgactttctgctgctaatgctactaatttctcttggtcaaaatcaaaataagttgcttcccaattattgaagacaatcggccgctgccgtttttgccaataaggggcaatcacgtgcttttcaataaacgcagcagactcttgccctaacccattcaacccttcatcggtaaatgtcaatatacattctggggcttcaaagactgcatcttgctgcaatgtccaagaaaactgttcgggatgaatccccagcatcaagcgcacattgtcccactcatccatctcgacttgagcgagaaaattccctgaataaatcagatttgctccatagacacgtccctgatcattggtggcattggcagccttcagtgccacgaagggattgtgctgatgcccagaggccccttttaaagaccccactcgaaaggttccttgcgtcaatggtgtggctttgatttggcgttcctttagccaagcaccagaaagatgaacaaattcaaattgctgatttcttaattccagtaccccgctcatcaacgaagaaagttgttttttctcagcgccaagattggtgatccgctgattgcgcgcaatcgtgcctaaaccagcaaaaatagtgtaggtgatttccattttcaattgccgctgctcatcgatcaacattattcgcaggctttggctttctgttttttcggcaaaactcgccggtttggccagctctcgttcctttcctgcgaaagtttcgacttctgcgactttaaaatccacatacaaaggcacgtcttctgcaaaaatagtaacggctccttctcgaaagtcagaagaaccataggttggcaactcttgaaagcgatctgctaacgtaaacaggccatcattttcaaaaaatttgaccgtgccggcagatttattttcttttttggttaaatagtccatgtcattggcactcaaatgccccaaagatggaccaaagtacagatgacctaattgtcgatttggtaaaacatgcatcacataactaatcttttcattgtataaatgaaaaatcgtatcggttattatctcaatcatttttttcctctaatttcaactttattctcgtctatttcattatatttctggcatgcagtttccaaatactgcatgcgttttttgacccctttgttaaaaaagaacttatagaataatgctgccagcatgaaactatacgtattgcgggaacgatcaaaagaattctgttccgaatacgtaacctcaatcttttctgctcccctaggaacaaagcgatacctttgacagatttttccttgttcatagcctgttatcaaagcaacctcatcttgcgcgatttttttgactttcagcaccgctggcaccagcgtggccgctgattttgtgcgaatcatcaaatcaatttgactgttctcgccgaaaggttcttctgctccttttgagcgaaagaatgccgcttgttgtgcgatcatcacttgatagaatcgttccggcgttgtacgcatctgataagtataggtcaatgtatctgttcacatcttcgatcctccattttttcagttgccatgctgacagaacagaatactaagcttagctttctttgattctttcgtcgatggcagggccagtttgtgcgagcgcttctttggctagctcttctttttcttctttcaaatagccacgatccatcacgattaggaatggcacccaaatcaatgtcatcacagcaacagttaccaattgtagaatggcacctgctacagagccagttcccagccagccagataagaagaccggtgtcgtccagactaccgttgctccgattgggcgaggcacaagaccagcagcgattgcaaaataagaaatcgtcgtactagcaagcggggccaaaatccacggaacaaaagcaatcgggttcaatacgatcggcaacccgaatgtcattggctctgacacattgaaaacagatggtgcaatgactgtcttcatcagcttcttcatccgaatcgaacgagcaataaaaaatgccatcgtaatcgagatccctaattgcattccttggtttacaaaaacgcccatgaaggttgtattgatgatatgaggcagttgttctgcacctgctttataggcttcgtagttttcaatcgccaatgcattcatgatcggatcaatcacggcgttaacaaccagtgtgccatggatcccaaaccaccagaagaattgggtgaataaaacggcaatcaagactgcaggcaacgtgccccccaagcccattaatggtttctgtaagatttcgtagacaaagtcgaccgcattgccccatgacgtgaatgtaaacaagtaacggatcaaattaaataaaaacaatggcgcagcacctggaatgatagcaaggaaagactcagcgatcatcggcggaaccgattcaggcattttgatcgttaacccagaagcactgatcttgcaataaatttgtgtagcgataatcgctgtgatgatcccaacgaacatcccttccgcacctaattttgaaaggggaatcactgttcccaggtcatcggaagaaccgtagggcaaaagcattaagaaagaggacaatgagattgctccggcaaaaagttttggctggccatattttcctgccaattgatagccgatcccgaaaacaacaaaaatcgctgtgatactcatggttgcgttcccgataggaccaaagaaatcattcaaaaaggtcatcagtcctgcgggcagtttctcagataagccaaaggtagcgggtaaattttgaataatgatcatgattgaagcaaacattgtcgcgggaaaagcaaccataaagccatcacgcagactcaataaatacttattattggcaatgatttgggcaaaaggaaccatcttctctgctaatttatcaataaatttcataactaatctcctttaatttgtctgtaaacgtttactacaatcagtataattgtttagttaatgtttacacaactctaaaataaaaaaaagatcatttttcatgatctttttttatcggcaatcgattctcttaatatcaattcacttttacaaatcactcggactggcattgttcgaacgcccaataatttgtttttcgccagctctacactcatttgacccatttcttccgctttcattttgactgaagaaagcgctggtgtcataaactgggccatttgaatatcatcaaaactaaccactgatatatcttctgggatcttcaatccgtgttcatttaatgctttatagacccccactgccatgggatcactagcaacgatgatggctgtcggccgtggggtcatctcggcgatttttctgccaaaagctaatccagtctctggagaccattttccttgaaaaacatgactgtattcttccagcttgttcatcagcatccaatttttgtaattctctgcacgaatttcttgttcatcataaacgacttctcctgtgatcgttactcgactggaaacaccaccaataaatgctatgttctcatgtccttttgcttttaagatatccaaaatttgatgggtctttcgagcaaaatcagtttgtatgcaatcataggcgtcgttttcactataattatctaccaaaataatatgttgattgtaccggctgatttcttgcaatgcctcttgcgtcatttccccaatgatgatgacagcaccatactttgccagttgagtcagatctttgtcttggtctcgcatcgagaagacacgaaccgtttttaaacgccatttggctgcctctttctctattccgttacgaatcatcataaaataaggatcattacgctccgattcactgttatgccgtgtaatgattgctatcgtatttttatcgccagcttctcgcgaactcgaaaagctcttgtcttttgaataattcagctggttggcgatctcgatcacccgtttgcgggtattttcgttgatactaaatgtttcatcattgtttaagattcgcgacacacttgcgacggaaacccctgccaattttgcaatatccctcatacttgccattctgccaccccgttgtttactgtttactaaatctctttttaagaatagagagaaacagcgattttgtcaatccctacttgttacgcaagaaaacaggttaggttatcgcgtgcagaaaaatagttgcttcgtgtatgataaaagtagaaataggagggattcagatgaatatcacaacaacacttatgcagcaattggaaaaagacgaaggggaaatgattgcgattcggcggcacttacatcaacacccagagctttcatttcaggaaaaagcaaccgccgcttatatcaaagcctactatgaaaaactagactgccaaatcacagaatgtggcgacggctatggcctgatcgttgatatcatcggtgagcaatgtggaaaacagctggctttacgggccgactttgatgctctggctgtagaagaagacaattagctaccttttcgatctcaggttcctggtgtgatgcatgcttgtggtcatgatgggcatacggcctatttaatggttttggctaagaatttgattaccttaaaagaccagttaaaaggaagcatccgcatcatccaccaaccagctgaagaagtatctcctggcggtgccaaaggcatgattgccgacggttgtttaacagatattgatcatgtacttggcgtccatgtgatgtcttcaatggaaacaggcaagattggctaccactctggcgaaacccaaactggacgggcaaatttcactttgaccattcgtggcaaaggtggtcatgcttccatgccgcaactagcaaatgatgccatcgtagcaggcagttatttcgttactcaactacagacgatcgtttctcgtcggatcgatccttttgacacagcaagtctaacgattggttcttttgacgggagtggttcctttaatgcaatcaaagagactgtgaccctaaagggagatgttcgtgtgatgaaagaaaccacacgtcaaacgattcaccaacagatccagcgaatggcagagggtctagcacaaacttttgcggttgaaaccagtcttgaatatgatgacaattatccggttctttataatgatccagcttttacaatacaagtgattgattccctcaaagaagctcacttacctgaagtgaaggagatctttgattgcggtcctcaagatccctctgaagacttcgcctactatgcacaagaacgacctagtcttttcttttatatcggttgtatgacagaagatcatctcaatcatcctcaccacagtcctgatttcatgatgaatgaagactgtctcttgattgcagccaaagcggtcggtaccgctacaattgcttatttaatggattagctcctaatcaatgcagttaaaaagagtagtcataagttcccaaaacggcggtccccatcatgcagggtatcgtatcgttttgtctcaacttatgtctactctttttaatgagagatctggattgaagtaatcgaagcaggacagataattaactgaatcaaacaacaaccactcattcccaccaaaaataagtacgccggaccgaagaagccaaaaaacaacaatagcgtaatcgtccaaaaaagatggagcaacactcgtttaggtgagcgaccggcttgataaaaagcataaaagaagctgacttgctgcttcttttcgcccattaaaagcgtctgatagaaaaaaatcaagctacagatcatgaagatcacgatcagcatcgtggccatgacttgaaaaagcggttgtggaaatcgactaagaatggaatgatcaatcaaaagaaaaagactataaaagctgaatacaatatctttctttttattcagttgccacagctcagaaaatttcgtaaagaaaatcgtcgtcgttttctcttgttctgccctctcttgagtgtctttgatctgcttaatcgccgcaatcatacttcttgtcgctgttgccactgtaaaaaaaggcaatgagcaaaccaaccacaaaaattgtagaagaatcaatttgggcatccaattgatccaagtgatcagaccattgaataaacgctgcggatctatctttctcatcctttggttcctcccgtcagatccattccctcaataaagtagcgttgtgcaaaaaagaataataggatcgttggtaataagaccagtgttgcacccgccatcaaatagttccactgtgtcgttgattgattttggaaaacttgcaaaccgatttggagtgtatatttttcttgattttgaatatacagcaatggtcctaagaagtcattccaagcaccattgaatgaattgatggcaatcgtgatcagtgcaggtttggttaaaggaatcatcagatggctccagatatatagatgattggcgccatccatttttgccgcttcaatcagttcattattgatcgataagtaaaattgccgcatcagaaagatattgaaggcattcccaaaaaatgagggaatgatcagcggcagatacgtccctacccagccgattttagaaaacagcacgtattgtggaatcatcgtcacaaatcctggaatcatcattgttgaaaggaccagagaaaaaatcagttttttccctggaaaatccaacttggcaaatccataagcgataaatgagtttgaaagcacgttgccgaacacaactaacaccgtgataaacaaggtgttctttgcatattgccaaaaaggaaacgcattgatcgtatcaagataatttgagaaattgatttcttctggaaaaaacgttggtggataacggacgatctcttccattggctttaatgaggtgaataccatccacagcaacggaatgatcagaacgatgccaatcacagtcatcactaaataactcgttaactttttgatccgctgctgttgagaattgctctttattttgtacatctgcatacagtcagccctcctgagatagtgtactttgttgaagccatcagttttgtcctcctgcatagtggacccaacgaggagctaatttcagattgataaatgttaaaactaatacgattaagaaaaggatcatcgacatcgccattgcataccccatatcaaaagctacaaacgctttgttccacatatggagattatagaacaagagcgaattggcaggtccaccagtgccgtttttcgtcataacataggcttcttggaagatttggaaagaaccgattgtcgacgtaatgacatcataaaaaataattggtgtaatcaatggaatcgtaatatgtttaaacttagcccacataccagcaccatcgatctctgctgattcataaagcgttccggggatgttctgcaatgtcgccaagtacagcagcatcgcccccccagagctccaaattttcattaggatcaatgccggtttggtccattcaggatcaaacagccaggccggacctttgatgttgaaccagcttaaaaaagtattaatcaaaccagcggaaggcgacagcagctgcatccataacacatatactgccacaccggataaaatcgctggcaaataaaaagtcgtccgaaaaaagctgattcctctaatcttttgattcaataatgtagctagaaagacactgaataaggtcgtcagtgggacattaaagagtacaaaataaattgtattataaagtgatttccaaaaaagtgcatcttgcgtaaacattcgtttgaagtttccaaaaccaataaaattcatttttgacgttagattgtaatccgtaaagctgccgataaacgagaataacatagggcccagcatgaacaccatgaaaccaatcaaaaacggcgctacaaacaaatatccccagagggcatcttgtcttttgcttctcgatcgtttctttttcataattcccctcctttagtaaagtgttttctgccatcttttttcagcaaaatagcaaggatgcaatgagaacagtaacgatagaaaagggaatgcggctagccacaactccctatctcaatctattatttattttgttctacaagatcttccactgctttttgagcatctgctaatccttctgctggttttttattccctagcagaatttgatcaatttgttcattgactaaactgctgaaatctggtgcatccaatggtaccggagtgattactgtattagcaaaattctcatctgccatttgatagatcatttgacctttttcatctaaatgatcatttttgacaagattttcatttgctgttcggttagccataatatcaaagctcttttcaccaaatttttcttgaacttctggggttgaaagatactcgataaacttgtaggacgcttcgggatttttggctccttgaggaacttctaagacaaagccgccaccccatgaccagtgaccagaacctttttctttttctggaatctggatgacgccaaaatcaaagtcatctggcgcattttccatcaagctagagtaataattgatattctgtgcccgcatggtcaccaaaccagaaataaatggatctgctacaccggagccaaactcagcttctaaacgattgatcgtatcttgcccataataatcttgccaatcaagaatccaatccagagcctccactttattttctgtgtcaatcgaaaccttttcatctttgtcaaaccaactaacaccgttatcagcgttcaatgcccaaacatccgcgccaaggttccacaaaggatagaatccgatacgctcaaaatcatcgccttttttgacatctaatttgtgtgcaacagtttcaagttcgtcccatgtttggggtaactgatcttcactgatccctgcttctttgaaaatttgtttgttataaaaaatcacttgggtatcggtattgaaaggaattgcataagggtctccttcatattctaccgtatcccataattgaggataaaattcatcagacatgccatctttaacgtactcgctcaagttcgttgcttgctgtgcttctgcacgctgcgcgactgaattgatgtcttgaacaataacatccggtggatttcctgcagtgattgccgagagagacttcgtccaaatatctccccaaggctggtaactatatttcacttcgatttcatcttgtgactgattaaaatcgtcaatgatctcttcgatgacttcttggcgagcccccgatccccaaaaagaccaaaaatctaatgttattttcccatcacttgtctgttttcccgatgcgtcagtatttttgtcttccgaattactgccgcaagccgctgtcaccaatgcggtcgaaaacagcaacagccctattgatagtgcctttttcatcttttatccctgctttcatttttatcattattttataatgttgtaattttaaaatatcatgactcttagtaatgagcaaacaataagcattgtttttttatcaaaaaaaataacgaatttcatagccggagattttttgtagcgttttctttgaaatcttatttattttcaggcatgatagttttagaggatttttcttaagctattgttctcttttttcatttttttatcacttaagaaagaacaatgaaaataaaactacgttttatgaaaaaaagaaagaaggaatcgtcaatgttagttgttattgatatgcagaatcagattcgtgatgaaaatagtcaatcatttatttctgacagccctgctttgatcacgcgaatcgcaaaacggcttcaacaagctcgtgcagaaggtgaatatatcctttttacaagagatatcccgattgattgtaaagatactcctgatgaagaacaagaagcgttacagatcgttcctgaactgcaaccgttaccgaatgaaaaagtaataaaaaaatattactttagtatcccacctgaagttctcttggaaatcaaggagcaacttttcaatgataaaaatgaacaaaaacatatcgaagtgaccggagtagaaaccaacatctgcgtgttgtctaatacgatcgagattcagagtgcttttccagaagccgattttctcattaatcaacagctagtttcaggtagaaaccatgagtcttctggattgaaaatcttacaagacttcaatgtcgaagtggttgatcggacagataactaaaaaagaaacgccaaccacaggcgtttcttttttagttattatgcagtaattcttgcggtatctcgatgcggacatcatttgttgtctgacatgcaggacagacaaaggtgccttcgatcgcatcttttacttcaccataatcataatgaatagcgatttcatctgagtgtaactcgttttcttctagaggcggaactgttttcagcttcccatctacatcttcttgcagatgaacaatcaatttgccatcataattttccttgcaattcacacaagatgcttttccacgaatcgtaatatccatgtttttctcctcttttctacttttatgtgagtcctcattggggatacgcttcgatggatgagcccatcgatcctgttttcgatccacctttatagtgtcacgcttgtttagttaaatcaactattctgttttcaactgtcttgccgattgcaaaaaattcggctggtaaaccttgagcgtttcttttgtcaaaagcattttttcccggcacaattattaagaacacgaattttttgtcatcccaaaagaagaaatggcagtcaatcacacgaccaggaacctttcccgtcacatctcataaaaggaggaacaagtatgcgtgcagtaacatggcaaggaaaagaaaaaatggaagttcgaaatgtgagtgatccgacgatcattgaaccaacagatgcgattattcgaattacagcaacagcgatctgcggctctgatcttcatttgtatcatcacggtggtgcagtactagaagaagggtacgttgttggtcatgaaccaatggggatcgttgaagaagtcggcagtcaagttcaaaaattgaagaaaggggaccgtgttgtcatcccttttaatattggctgtggacattgtcatttttgtcaaaatgagatggagagccaatgtgataactcttctgatcaactttatggtggcctctttggctttggtaagctgaatggcaatcattggggtggacaagcagaattcttacgggttccctttgctgatttcacttcgtttgtcgttccagataccgcgatcccggatgaaaaagtgctttttctatcagacattttgccaactgcctactggagtgtccaaaatgcgggtgtcaaacaaggcgataccgtcattattcttggctcaggacctgtaggactttttgcccaaaagttcgccgttatggctggtgcgaaacgagtgattgcggtcgatccagtttcccatcgactggaaaaggcgcaaagctacaatcaggtagagaccttccaattggatgaccttgcgacaagcgctgatgatttgtatgaattaacaaaaggcggcgccgatgtcatcatcgattgcgtcggtatggatggtttagaacccgtcaaagaaaaagccaaaaatttggtcagcttgcaaagtggtacgatttcaccgatccaaatggcggcgaaagcggtcaaaaaatttggtaccgtgcaaattactggtgtctatatgactccagcatcgtcctaccctttacaagagtttttcatgcgcaatgtggcagtgaaacatggacaagcacccgttatccacttaatgccaaaaatttatgaaatgatccaaaaagaggagatcgacccaacaccgatcatcactcataccatgcctttagaagaagccgctgcggcttatgacatttttgacaaaaaagaagataacaacatcaaagtggtattaaagccaaattaacgcaaagaaaggatgatcgccctcagtgccaaaaatcaaacgaaatgaacatcagatcgaacttggtaaagacgaagacgtcattattaaaggacgccgttttcatgtctatttcaaaaaccggtatctgctgatttccctaacgaatgatattttgactggtttattttatattttcggaagtatcgtgtccttgacagatctgcctgcgatctatggaactatcgcctatctgataggagcaatcttcttaacgatccgaccattgttgaagatcgtccgtcatgtatttatttacaatgaacggaaacaaaatggagagaaagaaaagaatatcgaagtatccgatgatggtgaataaacagtgacgattttcttcaagcagtatttttcccaaaacaaaacacatgctatatactataaatatgcacaaagaaaggagaattctaaaatgaaagtattagacagtatagctttagcgctacttatcgttggcggcctaaactggttattggttggactatttgaatttgacttggttgcaacaattgcgggcggatcaactacattattcgctaaaatcatttacgtaattgtcggtatctgcgcgatttattgcttgaagttctttgttggtattgctcgtcaagacaacgtgaaccgataatcattgataaataaaaagcaagaaacgaatgatctgatccatagttgctctactttctatggatcagatctttttgtttgcattgccttttgtctctttttttatttgttgtataattagtgtcaacagcgaattaaaaaatttagataaatagattttggctggactaggaatagcagctcattcacaatgaaccgacaaaggaagtgacccatgactgataaaaaacgtaactccaagcttctcccttctctgcttttttatttcatcctcctgctcatcattgcaggaatcttagggatcgttgtactgacgaacatcaatattgccgaaaactggtttggactggatgagtacacagttgtagaaactcgcgaccaagtgatcggctatcttccgctactctggtacttcgttatagcactaatgatagtcttggcattattttttggtatcagaaaaagaaaaagggctttgttctattggatcggcacattggtcattctccctagcatcttgttagcatttggtgctttaacaaccttgctacccttcgaccgaaatttttttagagaagaagcctctgcttccgcgatcatggctgaattaaccgacaaaaaagcgctgaaagatcaagaggttcagctcatcagttatagctatcacattcggaacattcctttgaaaagcggcgtctatgcagtcgcgcgaatcatcaaccctaccactaaactacaagatgaatactggtattattcgacaaatcttttacaaaaatggcagaaagacagtgatacgatcgagttacctattcaagagaccattgcttataatgaaatcgattggggcgttattcccaaggttatcaaagaaacggaaaaacgggttgcgaaattagaccattattatcccggagttagtatcgtgatcttaaatggttctcaaggcaaatggacttggacggtcggtgtcgatgatattcggggacatactgcactgaatctggtttatgatctttcaggaaattatctttctcaatgggattaatcggtcaatacaggccctacttccatcatttattaagacagcaattaaacaaaaaactatctaagcgatcactgattgttcctatcaaaggacgacttgctaaaaaaagcaatgagacaatcaagattttttagatagtttttttattattattcacagatacgcctagcttttggcacagcgaaagcctaaattattggccgcagacatcccggagtttccattgcgggctgcgatccgataacgtttgcagtaagattcatgacacaagaacgaccctccccgtgtcgcatacatggcatcatccacctgctgaaatcgttgctcaaaaaaatggctgtcccatgaacgaaattgttccaatggtatccttgcgggattgctgcaccattcccacacattgccaatgacttgataaagtccatagccattcggctcataaaaccgagcaggtgcagtactcgcaaagccgtctgccttcgtatttgctttgggaaacgcgccttgccagatgttgcagtgatagtcttctccagctaaaaaatctgtcccccatggatataagtcattctctgtaccacctttcgcggcaatctcccattcagcttctgttggcagccgcttatctgcccagcggcaaaatgccaacgcatcatttcacgagacttggacgactggatgatccatccgttgctcaatcgatgagtccggaccttcaggatgtcgccagtctgctctcgcaaccgcataccaccaactcatattggggatcagttggctcctctgtttcgtcttttcggaaagaaaataatgaaagacaaacgaccagccaaactgttctgcttccgtcacatagcctgttgccgcaataaatgcttcaaacatctgatttgtaacagtcgtttcatcgatttcaaaagaggccatctcaacttggatcttgggaccttcttggtcctcttcaaagccagcttttgtatccgtgccaattcgatacgttccagcaggaatcttgatcatcccatctgccttctttctataataattgatagccgttataaagattgatggttagcaccaagaggatgactgtctggaagaccagcgtcactttttgtggtgagaggacagtgctgacttttgcccctaacaaaccgccaacaatcgcggctggaatcacaaaccacaaaatctttaagtcatagaggccaaatccagtggtcccagcaatcgtcacgattttcgccaattgagagaaaaaaatcgtacaaatcgaatagactgtcgcttctttgattggcaaagcaaacatcagcatcagcaaagaaacattgatcggtccgccgccgattcctagaagactggctagaaaaccaaggactaaaccacagaagcaataccagaagttatttttcagttggaatccgggccagtcatatttggtataaaagaaagcaaacaacaaggtcacgacggtcaaaaagatctgcaccatctgtacatggtcttcattctggaaaaacagcaacagctgatcaaaagcgacattgcccaagacaccgcctaagatggcgcctcctgaaacccaaaggacgatttgccaattgatcttatgtccgctagccaactgtcttgcggtagaaaccagcgacatagtaaagactgctacggcagaataaaacgagatggccgcaacagaatgggcgccgataaaatcaaaaatgggtttgatcagaacgcccccccccatgcctgaaacggcaccaaccgtattcgccaacacgatcactataaaataaatgaacccaatcacacacttaccccctgtaacaaacctaaaatccgattgatctgcggcacaaattcctgcaagagttgctgataaccgcaatagtccccatccacatagatggcatctttcattcgtttgcagccgccacgacacattttttgaaacgggcaactcagacatttctttggcatttcgggccgttgacacacaaacgtttttgcaatgtcctgttcaaataactgacgcaaggtctgttcttgaatataccccattcgatagtcatctaacacatagaaatcacaaggataaacactgccatctgcttcaatgacatattgcacttgacagtttcctaagatcccgcaggcggtgaattgttgcttgaccaataaattcaaaagatcatcaaaaagcttgatactcacataatgcccctccgctaattcttgcagccataactgcaaaagctggtggtaaaatcccgcaaaacgttttggtgtgagggcatagctatttctttctttcgcatctaaatcatctaaacaaggaataaactggacaaaatcgattttttgttcttttagaaagcgaaagactttcttagcctctttagccaatggattggtcaggacacaaagcacattgtagccaatctcaaagtggtcaaacagctgctttgtttgcagcactcgctgaaaagttcctcttcctttcggatcgacccgatgcaaatcatggtagagcggatggccatcgatcgagagaccgaccaaaaaatcatgttctttcaaaaaagcacaccatttttcattgatcatggtcccgttcgtttgaatcgcataatggacctgtacctgcttttgctgttgatccactagttgggtcacttttcgaaaataattgaggcccgccatcgttggctctccaccttgaaacgctaatgtcaattgatcaccgtcttctaagtctgcataaatattttcgatcattttatctgttacttcttctttcattttgccaaacgagcggacttcccgcaaggaactgacattggcataaaagcagtagctgcagcgaagattgcagagggaagatgcgggtttgatcaatactgaaatatgtttcatggtagaagcctcgattcttttacgaaataacggatcaacgtttgtcccgtttcattggcacataatcagttgtctccatataaaattgggtgatacgatttttcatagtttgtagaagatcctgatagtcttcagtcaatgctaaattgttgatctccatcggatcttgttctagatcgtacagttcatccgtttcatacaaacgcatgacgtatttgtatttgcccattttgcacataactgctttggtatgttcgggaccttcgctgtattgtgttgccaaacgcggccagtaaggagattgaggtccgtgaccgagttccattgcttgggtttcaccatggattcttccaccttcacaaaaaaccgcgtccttatgctcttcatctcctgtcaacacatgtaccaatgagcggccaaactgagtataggagagttcgatttctgccaattctgcaatggttgcaggcagatcaactagctcggcttgtgctttagtgatccgtggaacactttgaatggatttagctggtttgattaataaaggcacattcgaaattgggtcttcaaaacagttctggactttttcggtgattgtataatctcccgtataatccccatggtcactaaagacgatcaaatgcgtatcatcataaaacccagtttcctgcagcttctcttggatcagtcctaactggtgatcaaagcgagagaccattgctaagtaagttgcccgcaattcatcaaagcgttcttctgtccaatcattaagattctgtttttcattgattccgtaaagcattgacgccttattagggatttcctgaatatttggtcgacgtttcggaagtttcttacggtcgatgcttgaataccaaggatcttcacaagcatatggcggatgtggaaaagaaatcgtacaatagataaaaaatggcttatctgatttctcttttcctcgccgttcaatgaattccagcgctttttgaacacaattccagtcggttttgccatagccctctccatcaggcaattttcccatataaaatgaataataattatcaccagaaagcatctcatcataaagtttttggctggcttcattcatatctgcagaatgattgacttcactgtttttcgcatctcgtgtattggcatccacaacaccatcataatattcgtcacaataatcggtcttgggacgatcacctggaacgacatcgtttctgccgatccaaataacttcatagccttggttcttcatttctttcaaaatattaggctcatcttcacgttgcaggtaatgcatggtccggtgcccattgacatggggataaaaccctgtcaaaaaactatttctcgagggaacacaaactggattctgacaataggcattctcaaatgagaccccttcttctgccaactgatccaaatgaggtgtgatggaagcaggattgcccatatgtgccattgaatcacttctcatctgatctgctacaaacaaaacgatattttttttcaagaatcattcactcctatccgacaaccgtgataacggtatccatgttattaacatctgatttatctgtttcaacgatatctaaaaaattattggtatttgatacgatgaccggggtaacaatagaatagccggcttggacgagtgcatcttgatcgaaagtcaaaagcaattgtcctctagtaacagtgtctccttgggcaactttcggctggaagtatttaccttttaaattcaccgtatccatgccgatatggatcagaacctcaatgccctcatttgtggtgataccgattgcatgatttgtaggaaaaagtgttgaaacgacaccatcagcaggtgcaaatacttttccatcagtcgggagaatcgctaagcctttccctaacaatccacttgcaaaagcttcatcttccactgctgataacggaaggatctcgccttttaacggagcacttaaatcataaagcaccgtttgccccacttcattattgatcaatggagctggcgcttctgtttccggttgctcctctacgtcttcagttttggaattataagcatagaagaaagtaatcgcaaaacctaatacaaaagctactagactagctaaagcaaacccgataaaactattgtcgatcccattttcgggatggataaaacgaggtaaagcaaaaacgcccgttccaccattgatataaactttggtgttaaaaatccccatgatcccaccagcgacggctaccgcaaatgaggtagtataaaaagcttttttcctcggtaaagttacgccatagagtgccggttctgtgatgccaaaaagtgctgaaagaaaagcaggaaatgcgatttcttttaattttctgttttttgtttttagaaaaatcgctaaagttaccccagccattgcaacaggagttgccaatcctgccatcataactacatcatagcctaatgtggcataattgttcaacgcaattggaacaaagccccagtgcagaccgaacatgatgaagacttgccaaaaaccgccgatcacaatgcctgcgatgattggactaaattgatatgcggcagacaatccttgcccgatcagcaatcctgcccatgtagtgattggtcctacaatcaagaaaactaaaggaactgtgatcactaaagttaagaaagagacaaaaaagctacggacagctcgcgggatcagtttagaaaaaagtgcttcaagtttggtagccaagtatgcagcagcaatgattggaatcacacttgaagtataattcatcagaataaccggaatccccaaaaacgtaaggtaaacaggtgattcaatcggtgttcctgcaaaaactgtaaatagggcctcactaccaccattggccgcaacgatggttggataaaccaatgctgctccaatcgccatgccgataaacggttttccaccaaatttttttgacgcggtataacccaagaataatgggaagaagtaaaacaaaccatctccggtagcatttaaaatcagataagtacctgacgctttgtctaatacattaaatgttgtcaacaatgctaaaaatcctttgatcatcccggctgccatcaagacattgatcaccggtgtgaaaattcctgaaacaatgtcaataaaacgattcaggataccttttggttcgtctgctgctgcttctccttgtcccaatccagctaactcggtaaactcgttatagacttctgcaacatggttaccgatcaccacttgatattgccccccactttgaacaacagttaccacaccgggtagatttttgatcacttgtgtttgggctttactttcatcttttaatttaaatcgcaatcgcgtcatgcaatgggtcaacccattgatattctctttaccaccaatattttttaagatctgttcgttcaattcttggtattgcatcgttgcccttcctctctctgaccggtaataaaaagacaagaccaaacaaaactacgcgcagtagtttcgtcaagtcttgcctgcatcaccagtaacaccttgattatttattttcaattaatttttgcacatgtagcgtcagataaagctgttcatcatcatatagcgtcgtatttaaatagtcttcaatcaaacgtgtcgtttcataagcttttgggtatttgtcgacaacgtggacaagcagcgggtttcctatgtcttcatgggtgctgctattttctaatcgtttaaaaaagaagcgtaaatgtgtgacaaaacgttcaaaagctaaactatcttcatcgatcgcgattcgattatgaatacgtatcagtgacagaatgtctttgatttttttcgtcaaagcctgaatatcttccatttgctctgagttatcattgatctgtgcattgataaagtgcattgcaatattactgacttctgcttcatccaattcaaaagctgttttttgttcaatcaaatcgatggcatattcgccaatcgaaaattcatttgggtaaaatttcctgatttcccaagacaaacggttattgatactgattccttctttttttaatttgataagagtgaataaatgatccgtcaaagaaatgtagatggaatcactgagccgataggccaatctttctttcccatacgaaatgatatcatctgctaaagaagcatactgaatcgggatattttccaacagctgaatcagacgatctgaggattgcttatgcaatacaaatactttctctattttcgtctcgtctgctgcttgtcccggtttcattttaaagcccagcccggtgccgatccaaataaaatctttgccatcttttccgaccaaaaccgcattattatttagaatctttttgatcttcaagacgtttctcacctccttaaaatgaaaaaaggctatacctcaatacatgtgtaggttccatacacacgtacgaaggtatagcctgcattatcagtaactacccatttgattgtttatactatactatttatttgattttcgtgcaagcgtttttatcatttttttctgcttgcatgtgttttgttgagtaaatactccattcctactcctcatccagtaaccgactttgtccttcgatcttttggatctctgtgatgtcttgcgtgacttccagacagcctagatatttccccgttggatttttcaacgcaaaatagcgaatatagatttttcgtccccgcatgtcaatccagaaatcagctgtttctcttttgtctgaccgaaaatcgtctaagattttttgaacgatgtgcatacttttaggtgggtggcaattcactacttctcgaccaatcactgaatttgtccgggggaagactcgactcttcccttcagaataaaaacgtacccgatcttcattgtccacaaacgtcaaatcgactggcaatgtttggaacatagcaatcaattgttccagctgcaaggaaccggtgggaaattgaacggtttggttcgtgggagcagtcgttgtcactggcggttcagcgaattctccaaacccaagtcctgcggcaatacctgctgtggtttcttgggcctgtttgatggccaattgacgagctggctcccgttccaattctttctccagtgactcttggcttggtttccaaggcaatggttcaggaatataagcaaacccaatgtcaaagctatcttccgcgatccgttgccaatccgctaaactgaagacatccaatgtcataggaaccatgatttcttcttctttaaaaatcatttcttcaatttcagattttactgcctgccatttttcagctagaggattatatgctgctttgtcagttgccaaatactggttcaactctttgatcatctcgcgaatatcatcgtcgactccccacatgactttcggcggagcagagatgccatacttctccatatatgaaaagatcagcgtttcttttcttgcataatgtttgtcgatctgtaacagatcctgcagtgctgcttgcagacgtcctttttgtgaccagtccccttttttgattttcttgagcaatccatcgatttcgtccgtcaataacgattgcaggacttggttttctagcttgagggtatggactggatgaccaggttgtccatattcttcatttgaatgatggatctcgttgatcgatcccttaaatacagccgcatgaatattgcatagacgttggatctccgaagggtctaaaccgctttgaatcaatgctttttctgccgaggtgatctcagtgacatctacgccgtcaaattcttcattgaataagcgtttggcttcttcaaaagaaccgccttgatgaagcaagctcaaaatttcgacgattcgttcttgccgttgttccttcgttctcatttgtcgactcctttcacaagaaaaccttgattttcaaaagattgaatgattttttccaaaggtatctttttcatttgtgcgcctttcagaatcgtcatatagcgaccggcagtttggagcatgccgggtttattgatggcagtaaagccaagtttgctcataatatctttgatttccggatgttccgacactaaatcaaagagattttttgagaaatctgcttctttcattcttatccttccttctactgagaataattctcaatcaactgcatatattatatacgaaattgctcacaattacacgatcatttccaaatttatctcccctcacttggcacaaaaagaaaagaaccacttctcgacctctgcgagcgaatgattctttaatagcaaaatgaaactcttgatttagtgatagaaaataatcagctgcgatagcgacacacgcgattctctaatccatccaccacaccaaagaagaaaaagcccatcaatgcaatcacaacaatgcctgacagcatttgctcataatccattttagaccaagcactcaaaatcaagtacccgacgccataagtcgtattatagttttccgcaaagaacaaggaggcaagcgagataccaatacttacccgcatgctggcaaacaatgccggcatgattgctggcaaaatcaagaaacggatctgatgcagcgggttttgcgtgtaattttgcatcacttgaaagtaagttgctgggatttcttttaccccatctcgaatcgaaaccacaacttgaatcacgatcaccgaaaaaatcaggatcacctttgaaacattccctaaaccaaaaaaaatcatgaaaactggtagaaaagcgacctttggaatcggatataagaaatagagcagaggatcaacgattgctgctatttttgttcttccgagaaaaatccctaaaggtataccgatcagcaacgcaaaaaatagtgagatcaggacacgaatcacactggcccctgcatgtaaccctaattctgcacgcaattgccaaaatcgttggaaagtttgataagggtccggcagcgaacggttatccgctaacaagctgattccccaccataacaataaaaacgacagtgccccccacaaaaaagaacgtccggctttcatctgacttctcctctcatcttctttttcaatgccaatgaaaaagcataaaagtccatcgtctcacggcggttagcttggtggaaaactgggtttttgatctgatgtatttgatgttcttgaaccaataggatcgtctcgccaaggtaagccgcttcttctgtatcatgggtcactacgactaaaccgttcgcaagtcgttgttgctcagataaaatcagattttgcgtacgttctttggtttcctgatccaaagacgatgttggctcatctaacagtaaaaatgctggactggtcactaatcctcttgccattgccactcgctgtttttggccgccactcagttgactagggaaacgcgctttgaaagaatctagttctaacgcttgtaagcacgtttcgactaacttttctctttggtttttggggactttttggatttgaagaggcatttctaccgcttgataaactgtctgccacggaaacagacgtaagtcttgaaaaaccaattcgatctcagaaggatggctatcgccataatcgatatgacctgattgcggcagctgccaccctttcaacaatgagagcagggtgcttttaccaacccctgattttccaaagacgacgtatgtatggcccttatctaaggttaaatctagattgttaaagattaagcgatcttgaaatgaaaatgcgactgattctaaatgaatcgccataaattggctccttctttctaaaaaatagttgttccctctttcacattctatgctatactgattgttgcgaaaaaaaatagaaagggatgcatttgatgttccgcacacttgtgtttcatgaaatacgaccagacaatgagttaagtgagcaaccaagaccaatcgaagttgccgatggctatcaagatgctcttccattgccgttattcaatagctgttctcattttaaacaacaaatcgactttttgaaagcagaaaaatatcatacccttactttgaaggaagtcaaagactactatcttcaaaagaaagctttaccagaaaaagcggttttgttgacgtttgatgattgctaccaatccatgagggaatatgcctacccgttattgaaagaggccggcttcaaagcgaccgcttttgttgtcagcggttggttgtttgctgaaccgagcccttataagccggctgtttccaaaacactcagtcgctcggaattgaacgaaatgagtgatgtttttgaatacgccaatcatacgactcacttccatgaacgaaaaggaatgatgggccgctcaatgtgggaaccggctgaaaaatttgcggctgatttagattgctgcaatcaaactgtagcgatacaagatgtttttgcttatccctttggtttctatgatcaacagacgatcaaaacactagaagcgaaaggttttgtcttgtcattcacgacgattccagggttcaacaccctagaaaccccacgcatggaactacgaagagacattattcccttctcattggataagacatcttttgaacaattattcaaaaagacccattaagaacatcccttcaaggaataaataagaaagaggaacgaaaaatgaaaaaaacgattttatttacttgcttatcattattggctttaggagttgctgcttgcggaaacaattcagattccacttcagaaactaagacaactgacacctctgcgacaactgctgaagtgaccgatcaaacgttgaatgtggggattttaccagcagaatctgcgattccaattattctggccaaagaagaaggctattttaaagatttaggtctaaatgtagaaatcaaatcttttacttctccaaatgatcgcaatgttgccgtacaagccaaagaattggacgcaactatcagtgatgtgatgacagaagcgacgtttaagcaaaatggcattgacatgacaatcacttcggacattctagaagactttaaagtcttagcttcgccaaattcaggcatctctgaaatgaaaggattggctgataaaaaaattacccttgtaccgaacttcattttagaatacatcatggaccagtttgctgctgaaaatgattttacttatcaaatcgttgacattgcttcttttgcggctcgttctgaggcactattaagcgatcaagttgatggtgctgtctacacagaaccgcaagcgagtatgttagccgctcaaggtgcaattgttttgggcagttccaaagaagctggcatcaaaggtggtactttgcaatttatgactgatgtggtaaaagatcgaccacaagatgttgccgcattttatcaagcttacgatcaagccatcgattatatgaacagccacaaagcttctgaatatgctgatatcttagccgactatcagttcccagatgccatgagtacttacttagatagccaaaaagaagactatccttatgctgccaaagtcccacaggaccaactagacaaaatcgtggcttggactaaagacaaaggacaaattgatcaagcttacacttatgatgaattgactgattttagtttcttagcgaactaattcctgatcacttattacacaaaaccaatactcgaatccatcaaagccagtgctgtgatagattcgagtgttttttatccagccattatttgacggatgctcggtcaccgagtatcattcactaaagggttgtgagcgatgaaaactactttatctgttcgtttcactacataagaaagggagaaaatataccatgcccaaaattgatctttatttactgcaaaagccagaagagacacaattttatgactatttacctcaatcggagtcttggcacagcgcctataaacaacttcatggtgaatccttggtgattcattcttctgttttgactgaaagcattctgcctttcattactcacccacttgtattggaacttctagagcaagaagatctcgcgtgcttgcctttagtttttgcagaaaacaacctttattgtaaggggcgtcttcctacgctcaccgaatgggaagaattgacacacgttggtatttcgattcaggaattagatgaatcaccgagcgccacgaaaacagcggtctatcatgatcttatatgatggggaaaactatctgctaaactgtcgttggtaagccttctcctgatgaaagatttggtctttatagctataaaaaacaactatgaatgagagtgaaattatggaaacgatgacttttgaagaattaatccaaatcaactgtttttctgaagaaaaagaagaacgaaagaaagcagctgaattattagaatatcgttatggctgcgagattcgttgtggtgagatggacaaaagtgtccgctttgctcaccatgctcgcggctgtacgatcattgctgcgaaactttgcgccaatgttgtgattttccagaatgtaacgattggttcaaatcagcggtttaaccggaaaaagaatgcctgggaaaatctgggcacacctattttagcagaaaatgtaatcgttgcagatggtgccaaaattcttggcccagtcatcatcggtgaaaattctgtgattggagcaggcgccattattaccaaagacattcctgccaatagtgtagcctttggcgtcaatcagtacaaaccaaaaaatcccgacttcgatcttatcatcaatgaccaaaatatccctggagaagagatcatgcggatcaacgcagaacgcgtagccgcatttaatcagcaaaatcaacgctagcagatcatccgattatcgctagcaagacaaccaaggaattataagcgatatgagcaaacacagactcccatggatttttgttgcgcaaatagacgattgtcagccaaaatccaataataaagtaagggtataacaaaaaaatattaccattagcattaacaatatgggcccacgaaaacaacaaaagactgcacaatgtcgtaacaattctcagccatctttttctaccagtataaataagcgtatagcgatagaacatttcttcgaacaatgggcctactactaatgcccccaatagtaaaggaacggttctctgagacgatggataataaaaagtcattgattgttcacctggaaagataatctggttgaagaaaaccgttgttaaaagaatcgctacaaatgtcagcaagcctatttttatcaatgagagaaccttcagttcttttaaacgatccaacaaatccctataaaaaaggataacaaagaaacaaagcaacactagcttggcgcccaactcatgatagcccattaaaaatttcgcataggaagaaggaattccatgtatggctattcctttccagataacaaaagccaaaagaaaaagcagtttcttcaagtcttcactcctttttgagtagtttcactagaattgcatggtgcttcgcttcacaattaacctctatcaggattcttctcgttccgttctttctcatgattctctttgagtagtttttagatcattctcagcatttttttactcacactacaattatacactataaaaaggtatcaaaaaaacattcatccgaaagaatgaatgttaatcagacatttttttactgaacaatgtcattgactgattggttttttaggaagaacagaaatgaccgttctcgcgaccaagagatagcaccagataacaagaataagctaatggccgttccttccctcacaaccaaaggaaatgaaaaagctgtagaaaggccgattgagattatgacacacagcacatcaacactataccgatattgtttgaaggaaaagcgacttctatcagccatcagctgacaaaaattttcaataggaaatttcaagtgattgagtcgcaacacttgtcccgtagcgagtcctgaaatcaatgtcccaacgataaaacatgtgacttgtgccaaatagtttggcactatcagttttggcagtaagccatataaaataccattgactaaattgccaaagaaaagcaatgctgccatcataatcaaatagttgatccatttccgataacggtttttttgactgtggtccagaaaccaacaagtgactaagaagagcagattgatggctgtcgtaatggttccgaccttgatacctgtgattgtggatagtgagacattcaatgaattaaagctgcttacaccaacagctgctttgattgtcaagctgatccctaatgcgctgataccatagaaaaacagtgaccaaaagagggttcgtttcatatgagatctcctttcatttgctccttctccattatgtggtatgctaagaaaaacaactaggagatttctcctagaaagagaggaaaaatgaaacgaaccctttatcctgttgccaaaaagtttcatcaattggacttgcctttttccactggaacattagaacagtcctctgtttacgagttttctcacaacgagatcatacaagaagaagccgggacactgactcacttgtacgtgatccttgaaggaaaagcaaagattatcaagtctcaagccaatggcaaacgatcgattttacaatttttgcattccggtgatttcatcggagatctgaccttagtgtccgctgaaaaaacgaccaaagaagttttagcgatcggtccaactgtttgcttggcgcttcctatcgatcatgccaagcaagtattgatgcaagacattgattttgtcaaaatgatcagtcaatatattggcgataaattaattagacggatggaacatttctccatcaatcagacttaccaattgaattatcgtttggcgctgttgctcttggaagtagctgtagcgggaatttatcaagaaaaactcacagaaacagcagaataccttggtgtcagttatcggcacttgacctacacgttaaaaacattcaaagaaaacgattgtgtctatcgtgaatctaggggttatcgcatcaatgaagcaaaccttaagcaattgattcgatcgatgcaacgcgaatagacacgctcttttccttctatcacgcttctttgctgattgcgcatgctatttgctaatttgagaatggccacagttgaatagccaaactgccagtccctgagaagacgatttggtcttgctctttttgcggataaagtctggaagtaaaggtatactccccattgtttatgaacacttccatcgatgaagtgtccataaacagttggatctgtcgtaattctgatagttgaatgcttctttttttgcgtccatagccggaaggcccatgagaaagagtaaaaatatggccatcataagagagaatcgtgtcttggcgcaagagaagctgcagtttttttgtctgttgggttagctctacctgcagttcgtagacctctccagctaattttggagcagtaaagctatcctttaactcgacattccagaagaaaggctttccacgtaatttttgatattctggcaatggttgttggatcaatcgttgtccattgaagctcagttctcgcggcaatgtcgccgcatgctgccatcctcgagtaacagtgggattcgagtattcaggacttgtgtcccctagtcccatccagccccataacaatctgcgccctttttgatccaagaacgtttgcggagcataaaaatcaaaccctcgatccaattccacgaaatccgatgttggcttaaatttcaaatttttccaatctacttcccctaataagtagccagactggtataaattattgaaagcataagcttgcggatctactccctgtggtgaaaaaagtaaaatatcttgtccgtcaagttgaaagaaatcgggacattcccacatataaccaagggaataatcatcccctaaaaatatcccttgatacgtccattgtgaaagatcctctgactgataaatcaaaatctttccttcactttcccgagttcgagcccctaagatcatatagtaacggccctctttttcaaatacttttggatcacggatatgatcggtaaaccctgcaggatatgcttcatgcgggatcactacttcttgtttttcaatcgaataaccatcactaatcacatggaccgtattttgttctctgccactaaaagtataatcatggtccccttcgtttttcacatttcctgtataaaagaaatggatctgatcatcctttacaatcgcactgccagaaaatacaccatttcgatcatacgaatgttctggtgaaagaaaaattgcttcttctttgaaatctaccaaattggttgacgttttatgtccccaatggggtgcttcttttcctgcaggattttgaggaacatattgatggtagaaatgataaaccccattaaactgacaaagcccattgggatcattcatccacccagtttccggcattaaatgaaagtacagtcgccagttatcctgagcgatctttgcttttagttccgattgttgttccagctcttgccaggcttcttttgcacacaaatccatccaccactttcttctctacaatttttccattaattctcggttgcgcttaacgtttgaaggtcatcctcaatcgttgtttcttcattcaattcatcggaaatctttctccgctgcagttggacgcaggcaaagcccacactaaacgcaatgaggatcactgcaatgtatttcaacatggcgccgaaatctcctgtatacaacaacaaaccaggaataaatgtaatgcccattcctgttgctgccaattgaaaaacatacgtcatcaagccgccgatggctcccccaaccatgccagaagcaaaaatacgcaaggaccgaagattgatcccaaacaataatggttccgtgatcccaaacaaggttggtacagccgcactaatggcattcgagcgtttgactttgtttcggtaaagaaaagcagctgcgattgctgccccaaattgtcctgccatactcgctgttcctagaacttgcaagacattctctcctgaagtatttaataaaccaagttcgatgatgctcaatgaatgatgcaaaccggtgataacaatcaattgctgaaccgctgcatataagatatagccaataccaaaaggcgcttgtacgaggtaaacaatgccgttgatcactgctttttctgcaacttgcaaaatgggacctaatgcaaataaaactaatgtcagcgtcactacgatagtcagaaatggagtgacgactaaatccatcatttgtggaacaaattttctaaatcctttttctaatttggaaacaagccaaccaacaataattgcggggaaaatcgaaccttgataccctgaaatagaaagaccgaataaatgaaacggctgtgcatcgccactagcaactgcccaagcattgggtaactgaggtgctaccatcatcaaaccaacaacgatcccgatgatcggattaccgccaaattttttggtggcactataagcaatcaatacaggtaagaaagcaaaggctgtatctgtcagcatttcaaagagcgcataccagtccgcactaaaaggaacccctaattcaactagcagaccacggatccccatcaaaagtccagttgtaactaatgccggaatcaatggcaccaacacatcagaaagagtacgaacaactttctgaacaggcgtcagattggaataaacatcttctttaaaggctgtctgctgctcaccatctttacccattgtttgagcaaaagcctcataaacttcatttacttttccagtcccaaaaataaactgatgctgtcctgtattaaagaaataacctttgctttcagaaatgttttctgccttctttttgtctagcaacgcatcatttttcaaaataatgcgtagtcgagtggcacaatgctcataatttttaacgttttccttaccacccactgcttggagcaactgatcaatgattttctgatctttcattttaattttcctccatttcaactcactttattttgtggaaccggttctacaagaagaataacagaaaccgtttgcaaaatcaacccgttttatcaaaaaaaaaaagactgtgacaaagtcatcatccaacaagttaaaccgaatcatatgctattgtgatagattcctcggacttttgcgacgaggagccactgcaccgcaggagcaataatagagactgtgacaaaatcatcatccaacaagttaaaccgaatcatatgctgttgcgatagattcctcggacttttgcgacgaggagccactgcaccgcaggagcaataatagagactgtgacaaagtcatcatccaacaagttaaaccaaatcatatgctattgcgatagattcctcggacttttgcgacgaggagccactgcaccgcaggagcaataatagttaaggttcggatagtgttacttgtcggagacttatggcacagtccctttcacgaatcattatggtatttgttctatgggaatcgttgattgtttgatcaccagttgattcggtaacttaatcaattctggcacttgaactttttggatcaacttctggatcgtttccaccgcatcgacacctaactgatggtaaggatagtgagtggtcgtgatcgtcggaaagacataatccgtcgaatcatatccaccgaagccgctaagggagaaatcctccggcactcgcaagcctaactcatgcgcggctttcaatacggcaacagcaatgttgtctgtggcacaggctaaataggtcgcttgattctcttttagaaataagcgagctttttgataggtttcacttctggaaaaagacgtttcgatgaaagataatttggtcccttccatttgagcgaccacatccgtaaagcctttttttctcaagatccctactgcttcgtctttttcagtcactccgataaacaaaaaagaccgatggccgagttcaattgcatactctgccagtttctctcccgcacgataatcatcatggacaatcgaatggactccttgtaagtgttgacccaacatcagtacaggaacggtcaattgctgcaagacttgtgctagctcactcgtgatctctctagccagcataatgataccagcaaccttttgcttgaccagcatctcaatattttctaattcgcgttcttcattttgattagaattcgtgattaacaattgatacccattctttcgagctgtttcatcgatcccttctaacacactgttggtggaaggagaatccagcctaggaatgatcactcccaacagttttgtgtcttgtgcttttaaactgcgggcaaacgtattgggccgatagccggtctcttcaataattgcatcaatttttttacgtgtttgctcgctaacatagccattattcaaatagcgggaaacggtgcttttcgcaacgcctgctttttcagcgatatctttaatcgttaccgttaccatagtcaccctactttgctttttcttttattataccaagaactgaaacaaaaataagcactgattctctttcggatgccattcacttcatcaaaagataggaagccacaaaaaaagatgcttgctactcatgaaagagctagcaagcatccgtttatttctcgtgatcaaacgttcaagatccacataaaaccaataaagacaaagaataacacatacatgatcggtgaaacttctttaccacgtttggccgcaatcattgtgattggatagaaaatgaaacctagcgcgatcccgtcagaaatactataagtcaaaggcatgcctaataaaatcagaaaagaaggaatcgcgatttccatttcatgccatttgatttcttttagtgattgcgccatcagtactccgacaataatcaatgctggtgctgtaacctgagaggtcactactgataaaagcggagaaaagaatagaccaaacaaaaagaaaatacctgtggtcacagctgttagtccagaacgaccgccgacagcgatccctgctgaagattccacatatgcgcctactggagaagttcctagtaatgatcctgccaacatcgctgtcgaatctgacgctaatgctttccccactcgaggcatcttattgtctttcatgaaacctgcttgattggctaaaccaactaacgtaccggcagtatcaaagaaagtgactagtaagaatgttaggacaacgacccacatttgcaatgtgttgatgtcaccgacatgcttcaatgcgactaaaaaagtcgacgacatactaggtgctgccgaaacgatcgaacttggtgcgtggatcaaacctgtcactaaaccaagaatggtcgtcgctgccatcccaatgaaaatcccgccaggtactcgacgaaccatcaacacagccgtaatgaccaagccaaagatcgttaaccatgtcgtacctacactcaatgatcctaaggcaactaacgttgaatcgtcggaaacaatgatcccaccttcactaagaccaaggaaagcaatgaacaagcctatcccaccagaaatagcatatttcaagtcggaaggaatcgcatcaatgatcatttcacgaagtttaaaaatcgtgattgcaataaaaatcagcgaagcgacaaaaacaccggctagtgccgtttgccaaggcacacccatcccgatacagactgaataagaaaagaacgcgttgattcctaacgcaggagctgtcgcaatcgggtattttgccaagactcccatcaaaatacatccgagggcacttgctaatgctgtggctgtaaagaccgctccctcatccataccagaagcaccaaggaccgttggattgacaaaaagaatataggccattgaaataaatgtcgtgaatccagccaagagttcccgcttgatggtcgtgttgagctcatcaagcccaaaataagagtgaagcacatttttcattttttgaatcctccattattcagataggcgcgattattttccctctgaatccttaataaaacaacgaaatcaatgatataccaacttttcctccaagtaaataaacttttctaaaaatttcagaactattttcattttcatttaagatgctaaaaccgcttatttcccatacacagtgcctcatactcgttatgcttcgattgtaccacttgaatagtaaaaacaaaaaaagtctgtactgtcagaaacaaaaataggcagccaaagaacgatcatcttttccgcagaaaagccaatcctacctgacagaaagatcctatcaggatttcttttgctgacctattggttaaactgtttttgtgaatgatcaatccacaaaattttgctcttcctcaatcaaaatctttaattgttctgctgtcgttcgtttcattgacaacggcggcaactcttccaacgtaaagaaaccactggcagaggtttcactgttcgtcacaaaagaaccttctttgatcgaacaggcaaaaactaatttataatattgaaacaattgtggaatgtctttgcgcagattagtatcaaatactgcacaaagtttgtcaacttcaacaactaatcctgtctcttccaacacttcttttataacgttttctttgggtgagaaaccgacttctgcatagccacccggtaaagaccactcttttgtatgaatgtcttccactaataagactttgttatcctggcgaatcaatgctcgaacatctacttttggtgttggatacccttcattggcatctagcacaagtttaagcgtatcggttgtttcttccgtcgatcggctcatcaattccactagaatttctttcatttcgacataacgctcttgatcataaatatccttgccataatagatcccagcatcagcgattgctaacaatcgctgatacttctcaaaaatctcctgcatctgctcccctcgctttgtgctctgtcattctctctttatgataaagcaaattctggcagatagaaagccagacagcactaatttctaaagtcagctagcataattcaacaagcaatcattctttgcgatagatcatgctttgctggatttgctttaacgcaaaatccatgagaaaaatcaatcccatagccaataaactaccgatcaatgttcccgagaaacgccaaggaatcagatggagtggtacaaaactactgccgatagtcatcaaaagcagcacttgcggattggtaaaaaagttggcgatcgtataattgacaggcatgaaatattccgtcaatacattcaatacaatcaaaatagcagcttttgcttctaatggtaaatccagtgccatgagtaagaaacctaataagagcccaactattcctcctagcacacgaccgattgttctttttttgatgttttccatatgttcgccagcgagtaccgcggctgcagaaatcaagatccaataaccattgcttgctctcaacagatatccaccataagtagcaataaataaaatcatcgaaaaatgcatcgcttttaggatcatttccggttggtggtaaagagcgacataatacttatctttgagagaaagctgctgaaagcgatctttgggtaaatgaaaaggcagcctttctgcagcggagatcagcaacccagccgccagagaacctacgattccataaagaagataggagctttgatgaagaatcgccagtaaagcagctgtcacattctgtgtttgatggtgaaaattgaatcccgttgcgtagagcatcagtacaaagaaataatctggttttggcaagcggtagattttggaaagtaaaaaagccgtgaaggacaagcagccgataataaacggtgcactccaaggaatcaatgaagtaatcgcccctaaaataaaggcactcaacaatgcaaaaccgtggatcaggattgcttttatattgtaactgaaggaacggtgctgaaaagccaaataagaaaaagctcccatggctccaacagaacaaatcatggggtctttggaaagaatcccagtaatcaaaggaacgcccattgcgatgccagagcccaatggacgtaatagtttggtagttaaattcatgacattcctcctctagcccctattgggagcgacatcttttataagtggttgtttgggaaaaaattagtatgtaaatgatcagaagaaaacaagatcttcaatgaaaaacacggcataactgatgaagcaagctatagaagatggaagatttttaacaatgaaaaaacaagcagcgactttctagcagagaggcaacggcctctctatcaattataggaatgaaaatcgaaatatgcaaacttttcaagaaagtttcgtgaatcacttgatctcagttaatctatcagaaaagacagtgctctctcattgccgtcaattatacggttcaagtgatataaaaaagatcaaaactattctggagcaaacaagaagttgcactcagttagttttgatcgaattattttattcctctatctcctttaggataggaaaaatttagtcctcttttattttacagatgcactagaaacagcatcgactacgacagcctctggcgcaccagttgtcgtagctgactctgcgttatcttcgtggacagaagcactggtaacagcatctgagttctcgtgaacagaagcgctagagacagcatcttcgtttcccaccaatttttgaccggtttgttgcagataccattcaatgattggtttgaaatctagaatatactcgttgatacctgcatattcgccattttcatcatgcatggcttggtaattgtggacgatgtatttctctggaacctgttttggtacatgaacccgaacagcatctgtagcgccgctgcgcaattgttggatcacccattccacatttttatatgatttttcagggtgacagtttgctaatggattgcccacctgaccgggaacacgagctgccaacatttcatgggcttcttgacgcaagttataatacaagaattgattattgctatccgcaaaggtcaactccatcggcattgaatctaaaaagtaattgatttgatcgacggtcaataatccacgatttaactgaacgtaagtatttccagaaacggcccctactgcttctgcagctttctcaagccattgatcatcagacatatcaacgccttccaccgttgtagcgatcttcccagtcgcatgtaaatcttctggtggcaattgtttaggtccagctaatgcagagactacgttaataaatttgacgaagcttgctaacgtgctgcctaaaaaatcaattgttcgttgatcgatcagattcccatcttcatcaaaagcttcttttgactttcctagtaaaaactcattcccccgcatcacaagtgcattgactcctggggcatccaagatttgacgcaaatgcaactgtgatctggaagttccttgatcataatacgaagcacccacgaccattactggcttattttcaagaggatgaatcttaaatgaaagccattccaagacacttttcaggcctgctggtactgtatgattgtgttctggtgtagcaatgattacgccatcggctaaaatgatttttcgatttagttgctggatctctggactgttcgtttgatcatcatcttgattgaataatggcaaatctttgatttcgaccagttccaaagtaaaaagttcggtgaattgttttttgatgaatgttaataattttcgattggttgaaacttctgctgttgatccgacgataccgattaatttcatcttttctatctcctatcgcaattaaatggtttcccaagaaaaattttctgcttcacgtttattagcttgatgggcatgttgtaactgacttgtgatcgtcacaaacaagagaaaatcactgaatagctcccgcaattttgttacttgctcttcatctttcaggcgtccttgttcatcaaaagcttgcaatgagtgccccaaaagaaattctgaacttggcatgatccgtgcttttaattccggtgaatctaaaatctgccgcaaatgagcctgtgctctggaagaccctagtgtgccatacgacgcccctgtgatcataacgggcttatcaacaaaaggaaaaataccataagaaagccaattcaaggcattgatcagcgaagctggaacggcgtggtcatattctggggtactgatgatcacgccatcagcagcttcaattttttctgcaatccttctgactgcttccggcaactcatggtcttccggcttattgaataagggaagaccggcgatttcgacaagttcgatctccgcttcactagcaaaaaagtttttcatgaagtttaacaaatcgcgattcgttgatcgtgatgagttggttcctactaagcctataaatttcattttttattcttcctttccaaaataattttctttgatccctgacgtgtggcagacccgattctcccttgtgacaaggattccttcgattccggtctgagctttcaattgatccaccacttgaacgatcggtttaccaaataaacgagttgtccagatttctccttccaacgatgacttagaaacaatggtcagactcgctaagtcacttttggttggaaagcctgtttttggatcaatgatgtgatgataaacggatgctccttgctgtaaatagcgttcatagataccagaagtcacaagagaggcattcttgactttgatgatctccaatgattgctgccttgttccttgggggtctctgatacctatacgccaaaaaccatcctgatgttttggagacgcgccataggtcacgatattaccacctaaattgatcaaagcataaacagcatggttctgatgacagtacattcgtaatttatcagcaatgtagcccttagctaatgaaccgaggtctagcagcattccctgtttttccaagaagacactttgctcttcctcattcagacgaatttgttgcgggtctgtcaatggcaatagtgcagttacttctgagggtgtgaggacttttgcatccgtaaatccgatccgccatctttggacaagaggaccaatcgcaatattcaagtgactgtctgctgcacaactatgatatttgccgattttgatcagctcataaagttctggatcgacgaccacaggatgttgaccagctgcgtgattcaccgccatcaattctgagtggggatcgtttgcgctaaatcgtgtttcatattcatgcagcaggcgttctaattctgatagtaaccacattggatcgttatgggcaacttgtaatgtgatggttgtacccattcgatgaatgacccttgtttcttctcgaaaaaagttttcacccatttgtatcccttctttgattccaaaaatcaaacgactcgctagcgaaccatcatttttgttagtattttcacaatcagagaatactcctttaaaacatttttgtcaatatcattatatatttttttatatacaaaaccgcgctaatcttatataaaaaaaagaacaaccttcgatctttcgttgctagatcaaaggttgttccctataaaacggatcaaaaataacgactcattttcatttgctttagtcatgcatcattatagctgttttttcatctgatttaactcattgatcaacagccgatttttgttgatttttgcaaacgcaagtgcatcttgtatcaattctagaatgacagaagctggttcgccggcagcttgggcatttttggccaactgtgcagctgcacgggccagataataggtcaaatgattctctgagcaaatggcgatcgcataatttaatagtgcgttgctggtttcaagatcattcgtttgcgcgtaaaaaaccccgcaatggaaaacgatattcaaaacgcgccagatgtcttccgttgtctggatgggatacgtataaatttcgctaaatactttatcgaaatatacttccgctttttccaactcagcttcacgcgcataagcgatgccgatccccgtgtaggccagcagttgaaatactgtgtcggtcgtctttgacatcagcaattgatcaaaatggaacaagacatccgtaaacggcgcctggttaaaaaccatctcgaatcctttaagataataataacgagctcttaaatcggcgtctttgatcgttttgggatcgattttctccaaaatttgagccaattgttcaaattcactggtaatcagcgaaaattcagctttttctagttgttcatctagttgtgaattcaccacattgattgaagaaaaaagatccactaaaggcagattgattcgattgcataacttgatcaatattttcaaggaagggacttgtccattattttcaaacctgctcagagttgcttgtgtgcaaataccctctgaaagttctttttgtgacatcccaacagcctttcgtgctgcaataaatttctctacattcaattgcctttcccctctctgcttcaactttggcagccattcagtatcgatatgattttagcatgtttttttgaaaacaggcaccctcttttgattttatttttcacttgtgaaggggaagactctatggaacaatcacttttctgagaaatcgccttttacgacagcccgctgggtttgatagcttcctttctcttttcctgtacgtatctcggctagctttgtttcgatcattttcataattttgttcaagttttgagggtctgctacaaaatctagttcatccccatcgatctgcattttcggacagacatcaaaattttcataccaagcatcataccgttcgttcaacaatttgtagtaatcatacaaacttggatcatttgccacctgttcatacgaacgtcctcgcttaccgatccgatcgatcatagtctccaaagaaactttgatgtggatcatcaagtctggttgtttcattggggcggagtcttccaactcacgcagcatcgtgttcaataaattgtcgtattgctcgacttccattggtgagatccttccaagatctgcattcaaatgaaacatcatgctgtcttcataaatcgaacggtcgatcacattgtcatcgtgagacaaggcttcccgcattgcaagaaaacttttattcaaaaaaaagatttgcaacaaaaaagcatatctttctggatttgagtagaacaatggtaacacatcgttgtcctcaacattttcataaaatggttttgaagccatttccttcgataaaaaatcggtcaaactacttttacctgctccaatcgttcctgctatcaataacacatgcatccatccttcttactaaaatatcgttgagccatccttgtctcgctttttccctcactgataaacctaacactgaagctgattcaaaacgtaggcgtatctttacatggcatttggttagcagcaaaatactcataaaagaccttgtttactgatttctctttgataacaaaagatttctcgcgactaatgtctcagtggcaacctctctagtgtatcaaatccagcaggtattacaagattgaaggtcctttttccaataacgggcactcttctgctaacaggttgtcgtctaaactcgtgcgtttctcagagtcgtaatggcggattctttatgcttgtttgcctcacttcgacacaaatccctgctaaacgattatgacaaaaacagcgctccttccaaacttcaagatccattttacctaatctttaaaaaaagtaaatacaatatatagtgaacagagtgtaagaaaaagattaaaaaatactatatattgtgaagtaatggtatctaaaggaaggaaatattcagtcactgcagctgattttgttattcattttttccccccaaaaaaacacaacacctgctctcctatcagaaaaaagagcaggtgttgtgtttaaaatgttgctattccacttcaatggatcagcaatcagtcgtttttgtccccttgaatcaaaaaacaaactctagctagggtatatcctttgtgtcagtgaactgatttccgcctctttccactaaagaatatctttccatgatccttaacgtaagatttcgatcgttttctcgattttaaccgttacacgaccgttcttgatcacataaacccgttcgggaatatcaatcaatgcattgcttttcgactttgtatctaacaatacaagatcggcttttttaccaacagctaatccataatcagctagtttcaacgctttcgccgtgttggtagtgatcatcggtaaaaccgtcggcaagtcggcagccccacctaagtgggcaactggaacagctagcatcgcaatctgaatcaagtccccattcccataaggtgtgaaggcattgcggatgttgttgcttcctaagcagatatttacaccaccatctcttaatttgcgaatcggagtgactgcacgacgcacattataaggatcgtttctcgcccctaaatgaagatcggtggcaggcaatggcatgacattgatttgtgcttccgccatcaatgagatgacttctgctaatttttcaggcggcatcgcatgcaacgcggtcaaatgacctacggagacacgcccgtgatagccttctttaatggtcttctcacacagataaacaattgatgtctcatccgcttcatcggcgaaatcttgatggagatcaatgtctttatcaaactgtttggcaatcgaaaaaaccaaatcaatatgctcattggctggtgcatcattataaggaattccccctacaacgtcggcacctttttccattgcttcgatcatcatcttatcagtaccaggcgccttgaagattccttcttggggaaatgcgacaacttgcatatcaatcaaatccttgtattcttcttttaatcgcatgatcgtatcaaagcccgtaaatccttgggctggatcaaactctgcatgagtccgcacagctgtcgtaccatgaacgatcagcatctcaagtgcttgttttgcccgttggtatatgtcttcctctgtgaaagttggctttaattttgcagtaaccgcgatagcttcttgcagtgtgccggaattgttgggttcacggtcagcgatcaatgctttatccaaatgaatatggctttctacaagaccgggaatcagcactcgtccattggcttcgatggtctcatttgcaactgtttcgatggatggtgcgatctcgacgattttgccagcagtaatgccaacgtcttttaactcttctccatcctcgattcttgcttgtttaattagtagatccatttcttttcctccctcttacttacccaaaaatcaaaccaatgaacaacaatataattgaagcaagacttagccatttcacatttcctttgaccacatccaaaatggggatttggaatcctgaagataatgcttgcatcgtgatgttgacgaaactcatttgactgcctaagcccacgcccattgtgacaaaacctaaagcaatcggtgggaatcctagggaaacggcgactggcaaaacaagtgtcaacactgagcccacatacgctccagcaggaatgccaatcaagactccggttaaaatcgccacaggtactacaacaaattccggtgcattttgagctaccccagcaatgacggcaaacgttcctgtttgcgcaatgatattgatgaatgccaagaagattcccacttgaaaaagacgagtcagaatatacgttgatccatctaccattgcttccaccgattgattcattgaaaaatcagtacataagtaaatcaatgctaatgtgatcaccatataaacaagcggtgtgaagaaaacaaaaccaatcaactcattgactagcgggccgaatataactgcaaaaagcaagaaaatcgctggtaatgtgattttgaacaactcgccattactttttgtttcatattcattttctgcagaagctttaaagccgatgtgccggcgcttcgttccccaaaaagccaaagcgatagctaacacgacaaacaacaaccaaaaaggacgcatctcaacaacataagaagaaacgctaaagccgcccagtttggaaacaatacttgattctaaggaggcaggagaagttgtaaacgagacagctgccgctagcgacatggctgcaatcaattctggaaccactcccactgctgcaaaagccagtggtgcgatcaccattgcactgccgccgccaataccagacatataagtagctgctgcaagcaaaatgacaataaatgcagaaacatattctaccttgccttttgttcctcgtttagccaaagtcaaagctgccgtatagcttcccgctttgaaaacagccattgccacagcagaattgatgatggggacagtgatactcaacatcgttggcacagcttccagcagttgcgtattggcttctgctaaactgatacctccgatgatcattgctagtataccagcaaccagtccagcaatgatcatatctacctttctaaataaaagaactaaaaccaagaccaatggaactaaaaccaaaatagctttaaatcctgttggtgcaacgatttggtcaattgcttcttcagcatgtacagcaatgccataaaacattcctacaaacatagcagcaagcaaaaaaacccattttttaaatgttttcatttttccacgtccttttttggataaaaataaatgcattgaaaaaaacgaatgattcagtctattacgtaactagcaaaataggttattccatttagagaaactcaaacggggcctgctttctccttttataaaacaattactgccgattacctattgaaatcaaaatgagatcactcttaaaaaactacccctttcactacttgctattcagctacaagttctctgagccactcctccctaagaatcattccctgcactgtccactactaataaacggccacaagatgccgttggtgaatcctttgaagttgtcggacatacaaatacaccgcttttttgtgggaatgattcttccttttctccttttctgcctatcttcctgttttctattttacgcgaatgtgaatccgctttctttggacgttattctaaaaaaaacgatctttttttagccgattgtctaaatcatttgcatcaaagtgaaacaaaagcggctgttctgcctattctgaccagccacttttatcaattatctggttccactgaagaatcgcttaatccgctgatagaccagcaattgtttgcgggcacgttgaatccggcgataccgatgaggatttttttggtaaaacccttgatggtaattctcggctggccagaaagtcgtggctggtctaatctctgtgatgattggttttgcataatgacctgccctttgcagctgttcttttgacgcttcagcaatcgcttgttgctgcggatctccgacaaaaatgattggtcggtactgctttccccgatcttgaaactgtccaccagcatctgtgggatccgtcaactgccaatacaatgagactagctcctcatacgtaatcaaccgattgtcaaaaatgatttccactgcttctacatgtccgcttaacccgctactgacttgatcgtacgtgggatgcgggatattcccgccggtatatcctgaaagaacagaagtgatccctattttctgttcaaaaggctccaccatacaccaaaaacaaccccccgcaaaaatggctgtttcttgatgactccagtcagtgatttgatgtgtctttgttttttgagttgtttgagttgtttctatccctcttaactgatcataaaaatcctgaaaatccggtgtcaagttgcctcgaagtgccaatggtcgcaaagcagcttccaactctgataggacatttttttgttcttgtccggattctaaccgatctcgggctgccaacaactgggatcgttcccaatctcttgtccctggattgatgatcaaattgtaaagctgacttaatcgttcctcgtccatccttctcatcctctctgccagcaaaactttgaagtgttccatcctcttgcaattacttgaaatgatttatatgcaaattaccatatttccttcatctggcctactgattcgctttctgaccaaagaaaaaattctctaaatgacaaaaaaaccgaacaaatagcggtacagaccatcaacataggagggtctgaaattcctgtagaacagaaatcagctatcgttcagttcgaggtattttgctgtttggttatcttaagagcattgtttatcttgttagtgaaaaatacaatggacttaattcttctaatgcttcagtcgtcaatctctcaacatcttcgatgctctctgatggaaaccaaagtttgccgatttgaaaactgcgtccttgcagcttttcttcaagttgtctttgtttttgcggctctgagaggtatacagctaatgggcaatgatcttctagttcatgttccacctgtggccaaatataataatcagccaaatttttgtctttgctccattcttcaatctgccagcgtaagtcattataggctgctaaactccctgaacgttggccacttttgtaatgttggaacatgaaatagacttgatattgcttttgattgatcaatgcagctaggcaggcattttgattcggatgtgcctcattccgataagcacaccaaaaatgactgcgcaaattccaaccattcgtccaactctcaactttcggttgaaggtctgctgatacattggttgcgacagtcatttggatatgtttccatttttgccagctcatctgataatcctctttcagccgctgaattgtttctggtgggtagatgtctttgatttgtttaaaggcaaatacctcacgatcgaataaatcaaaatctgccttagcaaattccataatgtcaccttacttttaagctctatttttttagtggtagtaaacagcatctaggaacaatccttgggaaggcactgtctctccggctgcttttcggacttgattcgtaaatatctcatcgatcgccgaaatgtccattgtacccgcaccaatctctaaaatcgtcccggtgatgatccgtaccattttataaagaaagccatctcctttaaagcgaaaacgcagcatatctccttctcttgtgagtgagagttcctcgattgtacgagtagtggattttttggtcttttttaatgcagaaaagccaataaaatcatgagtgccaataaacttctcacaagctgcttgcattttgtcccaatcaagctcttgcggacaatgaaaactccgatgacgttcaaatacggttggaatcggactattccaaacataataactgtattgtttgccggtcgcattgtaacgggcatggaaccgttcagaggcttctgcgacctctttgatgacgatgtcttgaggtaggtagcgattcaggaattgcaacattttttcgggggacaaatcgcttgctgtcttgaaattggctacttgtcctctcgcatgcgtccctgcatctgtacgtccagacccgatgatttcgattttttcatttgtcatttgtgtcaaaatactttcaattttctcttggatcgttcgatcagaatcgcctaaacgttgccaccccagatagcgcttgccatcatattcaatcgtaagtttaatatttctcatttatgttaattgctcctgtcatcaatgatttaccccaaaaaaacgggttcccttgcttatcataagggaacccgtcaccggtgtaaatgctctaaagaagattttagcgatatttcaagaaaacagccaaagattcaaatttctgatgtcattaaaaacttttatttcccaatcactaatctccttgtatagactgcttggcccgaatgcatgactgcatcatcgacgatggagacgatccgagcttgtcgtgtcacagctggcgtccagttctcatcaatcacttctgataagctagtttcatcgatagactgaaggtaattaactgctaactcgacactagcagaaagataatccactaatagttctttttgattaacaattaccttggcggcttcttctggtgtatgacgccaatcttctgtatcgtcaggcaaatccaaagcaaatcgcttcgtccagtccgctagccaaagtggttcttgatccgctaatgcggaaatctgcagatcgatttcgcgagcggtatgccagatcagccaagtgactgacttaatcagtggctccggcatcgtgttcgcttccgcgatactcatttgtgccaacgtttcttcaaatcgttcttgggcccgttgcaatgtctcgatcgtcaattgtgtttccttcatgatactcctcctctttagtaagtgcttatctttactctactacagaaaaagggagaaaccaatgaatcaacctgctggtaaaaaggactgaaaaattattcttccgcataaatttctttggctaaattgaatgccgaccatgctttaggccatccggcatagaaagccaagtgtgtgatcaattcaacgatctctgcttgagtcacaccattttctttggcgattcgtaaatgagcttctaattgaggcacaccttgtgtcaaaaggctggcaacagtgatcaaactgcgatctctggcggacaattcttgttctctagatcacacttctccgaataatacgtcatcattcaatgccgcaaactgaggggcgaagtcacccaatcgttcgcttcctgctgtttgttttttcattctcattgcctccttatttttgtaactgctgatagtcttcctccgccacagcttcgagccattcaggcgttccggcagtaatagccagatgttcaaaccagctatcttttgctgcgccatgccaatgcttgatgccatcatgggtgacgacaatatctcctgctgtcaaaaattgggctggttttccttcttcttgataccagccttcaccaccagtaatcagcaaaatctgataaccatcatgatgaatatgccaattgttgcggcaacctggctcaaaagttacattcccaacgccaacattgaccgaggggtctgcaactaaagtgtttaaataactttgtccaacaaagtattgggcatacgcttcattttttgcgccacttgggaaaatcacgccatcttttacctcttcaaatttttccattgcttgtctcctccttgcatacctctttgtctgataccattgtgccattttgtcagctttcacaatcaataaagcggcaatcctttcaataacttacaagttcatgttactgcttgatccacataacgtccaatacttgttaagctgatttctatgcttgcaaagcatgcttgaatttcttcaaaaatgtttggactgtcggcgccaaaatcgtctctttcctccataccagaacacagttcgtttccagaggtggcgaaaaggggatgaattttatttggttttctcgatgatgaatcgctccagcaattgctaaagcagcaccaacattgttttcgaccaataaaagcacattaaaaatcaaattgtatctcccaacgattgtcaactcttcttcaacgaatcccccccacgtgcaaaacatttccaaaacttctttacgactcgaacaaatcaacggtgtggtgaggatgtctgcaggtgagatactgctttgatcagccaacgggtattcatttgcaacaaacagcccccagacttctttcttaggcaatggtcagccgattgtattgatccgtcgttgcaggatcaatcaaaatcgccacatcaagcaagcctttatcaagtttttccagaatatcattactagttccgctaaaaatagtaaaagacacttgggggtgatcagtaaccatttcttcgatgatttgtgtgagcaaataggagttttctgcttccacacaaccaatcgcaatttgtccattcagaatcgtctcctgataattgaacaattcttgttctgttttctgattcaattcaagaatttcttctgcgcgcttttttaaaaacagacctgcttctgttaaataaagtttcttattttggcgcacaaacaattctgtgtgcaaacgctcttcaaactctcgaatttgtctgcttaaagtgggttgcgtaatgttcagctttttagctgcttgggtaatattttgttcctcagctattgctagaaaatactttaatacacgagtttccatcgaaaactcctttcttctatgacacaacatttttcctactgttatctcagattttcgggaaaagaacgcatccttatttatctgtaacaacgaatactagctttattctaccacctaactagaaattcttgaccgctattcgtttggttcatccaaacaaaaaggcccttcattcactgaagagaacgaaggaaccgatagaattgaatttcagttgtttctaaaggacgtttttattacaagcgaatcggtgtagcagtcttttgcagaacattgtttagcgcttcaatatttgtacgtccttgggtctgcagccactctttcgccgcaccttctccctgagtcacaaaaggctctacagcgtttgcccaggttgctcgtccacaaagtacgccattgaattttgagccggatgttttggcaaattgcagtgtttcttggaacaattcagctgaaacccctgcactcaagaaaatatagggcagatccgttgcttccgcttgctctttgaaataaaccgccgcttcttcttttgtataagcagcttcctccgcatagccctctacatagttcatattcacagggacttccactttcaagacatcaacgccatagtatgcttgcgaaaattctcgcatcatatcatttactttatgaggttttttcaaagcatattctttcgaagtggtatctgggatagcagcatcataagaaaccagttctaagaaaaatggtagattttcagcaaggcattccgaaccaatccgttcgataaatgccttcttttgatcattgatctcgtcaggttcgtccacatcataatagagcaaaaacttacaagcatccgcgccattttcttttagccgtttcacagaccagttggacaaaagatcaggcaaacgacccggagttgaagcatcataaccggttttctcgtaggctaacaataatccagcttgttcatcccgaacttgggctgctggcaatccatactctggatctagtaaaattgctgaggcatagggcgtcaactcggctgacacgatttttttgaaggcactgatttgctctgtcgtgactgaatggtcttggaatctgccaatcatttttttcaaagcccctcgttgatcaatggctaaagcactaataatgccattttcattacatagctgttggatatatgcttgcttatttgataatgtcatgctttcactacttccttttttagttttctgccagttttccatttaaaatttcggcaatttcatcaggagactgtgcttgcttcaaacaatttgtcacctctttatgcatcaaaagccgtgccacttgagacaatagtttcaaatgtgtcgttcccgcttctgaatcaggtataaaaagagcaataataaaatcagttccttccccatccaaacttttccaatcgattttgctatttaattggacgatgatgacattggcttcttcgatactgtgatctttcgcatgagggatagcaaatccatccatcatccccgttgtactctcctcttctcttgttagcaattttctataaacagcagcttgatcactgctgatgcctagagtaactgcttgtgctgcaaggaaggtcattatttcgtcttgtgtcacaaaatctcgcttcataaaaatgtggtctgttttgatcaacgtcatttgtcttcctcttttctattctttcgctgtttctttccattcatcagctgaaacttctgcttcacgtttttgtacactgcgtttttggatgaaccctaaaatcactccacctatgatcgagccaagtaaaatcgaacctacccaagcaattttccccgtgacaaccggcaatactaagaagccgccatgaggagcaggaacttggactccaaacatataggtcaaaaccgctgcgatcgatgaacccaacatcatcgtaggcagaacacgcagaggatctttggctgcaaatggaatcgccccttcagtaatatgcgttgatcctaaaataaagttgactagccctgcattgcggtcgttcgtatcaaaatatttcccaaaaaataagacagcaaatcccgtaatcaatggtggcgcgatacatgccgcagaaacacctgccataaaggtatggtttccttgagctaacaatgccgttcccgtaacgtaagcggctttattgacgggaccgcccatatcaaatgcggacatacagccaacaatgatgcctaaaatcaatggattcgaattctggaatcctgccaagaaatccatcataccttgattgatcgcctccatcgggcttgctaacaaagacatcaccacaccaatgactaaaacaccaatcactggatataagaaaatagccttcaatccatctaattgtttcggtaatcctttcatgactttttgcaagaacagaataaagtacccagctaagaatccagcaaagatcccgcctagaaaaccagcgccaccagcattggccaacaggccgccgacaaatcccaccaccaaaccaggtcgtttagcaatcccttcagcaatgtaagccgctaaaatagggaccatcattcccattgctgtatccccaattccttttaacatcgctgatgtcggattataggtgggatcattaggatcaaaagagtagacaccccagattgcgaatgagacggcgatgatcacgccccctgctacgacaaatggcagcatatgagaaacaccattcatcagatttttataaatactatgtccgattccggcagccattcccccatctgcttgctccaatgcatcgaccgtcttgttttctgcaatcagcgaccctctcaatgcttcttcaattagctgatcggcatctttgattcctttgctgaccggaacattgatcacgcgttttcccgcaaaacgttccgcttggacatctttatctgcagcaataatgaccgcatctgcattttttatctcttctggcgttaactggttttctatccccacttgtccatgagtctctactttaatagctattcctttgcgtttggcggcttgttccaacgcttcttgtgccatataggtatgggcgatcccagtgggacagcccgttgcagcaacaatcttgtaagtggtcattttttattcgctccttcttttgatttcaatttgttcttccaactctgcaacatccgaaaaatcagttagtcccttacgaaaagcggttgaacttccagcagctaatcctttcttcaaattgacatccagcggctcacctgttaaataccctgcaagaaatgttcctaacaacgtgtctccagcacatgctgtattcactactttgcctttaggagagtttccagagtagaccgtatcttttgtcaagagaaggccgccttctcctcctaaagagagcagcacatgttgcgcaccactagccaccaatcgtttggcgtagtcgatatagcctttgcgatcattgatttcggtctgataccatgcttgcagctcttcttcattgggctttaacaagaaaggctgataaggcagacattccaacacctctgaataacttgaatcaataatcagattcacttgcttttcaaagcaaatacgactgattgctataagaattttgggcgagacaccttgtggcatactcccagatatacagagatagtcaccagcttgcagatgtctaatttgttctagcaaaagattgatctgcttttttgaaatttcaggtcccttattcacaagtttgtactccttattatcgcgatttacatgcgtaaaaacgttgattcgcgtaaatcccggaacgggaataaaatcggtctgaatcgcttgttgatgcaagtagtcctcaatataattaccagtaaaaccagctttgaaccctaatgctgtactatcgataccaagttttttcatgatcaatgagacattgaccccttttccattggcttggatatcatcatcctttgtgcgattcacttgaaatggtttcatctcatctgtttcgataaaaagatcgatcgctagatttaacgtacatgtataaacagccatttgcgcccctcctttcctacaaacctattatggatcactacttgatgtaaatgttttcataaataaacaaaaccgctgaaaacttttacaagaaatacttcatgaccttgaagtaggtgaatctttcgatttacaataaagactagctgaagggaggcagaacatggatacaaaattaagtgagtcagagcaatacctgtgggattttatccaaagtcatatccttgagattccgtcttgctccattataaaattaagtgaatatgcaaacgtttcaacggcgactgttgttcgtaccatgaagaaaaaaggatacgaggggtttactgctttcaagcattcactaaaagaaaaagataataccaatatcaattttgcagcgcttgataaggtggacgaagggataaagacggcgattctaaagaatgaacaagaagtgatccgcacgatcaatatggtggaaagcggcaatatcgaagacgcgatccaacgaatcaaagctgctagacgaatcatgatttttgctcgtggattttctgaactgattgctcaagaaatgatggtcaaatttcagcttactggcaaatactgtgagatgcataccgatcccaacatcattaagaacatcagtaagaaactatcaaaggaagatatcgtgatcttcgtttctttaaatggtgaaaccaaagaattgatcaccgcagctgaaaactgttatgaagcggagatcggtaccattctgctgacagccaatcggcactctagcttaatggcgcatatcgaaattccttttgttggcttcaaatcagaaggctccttctttccagactatgaagttcgttcaagactgcccctctcgatccttgctagaatcttgctcgacgcatatgcgctgcggactgcagaatcaaagaggcactgatatcttgagaaaatcataaccggtaaggaaactgtagttgatttgagatttttcaaaatgaaatgattcacgctgaacgcattgtttttgcagttattcatatagaattcgatactcgtcaaacgatggggttctttgatttttatccagttaaatttgcttatatttttttgtcaaaaaatgatcatccgaaaaaaaatctttcgatttgataaagcggttcgtaaccgtctatctgatcgaaagatttttttgaactgtttgcgtatagaaatgcttcctttatttcgcctcctgattatcgtcggtacgaaacgtcaggcattaggagtcagcaactttactggataacttaactcgaataactaaaacctaaaacttagtagaatgtttcatcgtatgcatgcatttaacccaacaactacgactatcaccagcccgctcttgcttaatccaaatcaattggttgaataaaatcaacctgccatttcccctctttctcagaatagttaaaataccatagttgagaaaaagattgttttcgatgtttctttcctgagaggatctgcttactcacccggtcttccacataatcgcaacaactgaaatcaattcgaatggagaagctgtctgcacgaagttgtcgataattctccacttgatgtaggatgactttctttgtatgattttttataccatcctctttattctgttgcaatacttgactgtgttccaacaatagtttttcagtatagtgtctgctggatttttcaagtgcttcttgatcccaagcggtttggatcgcaaaaaaagtctgttggatttcgtcaagcagttttttcttttcctttttattaccaggaatttgagcgaataaatcattccttctggttcgttggtctttttttcgtttaactaaagagagaatcgcggctccgcctactgacgccccaaccaaaacataattttctataactgatgatgaaccataggggctataatatccataccctcgtcttccccaagaagctctggaataatgatccgaatagtcatcaactgttgtgacaccgccaaagccgccaccggatccgccacgactggtcgaaccaccgccgtgtcccccagcaactgccattccctgcactggcagagcaaataaaaagaataaactaagtaaaaaagccataaagtagtgtttcttcattggataccctcttttgtctgactcagaaagcccgacaattttttcaaaatctttttcatgccattcagttccaagtgttcttcatcttagcactgtttaacgattggcaagctgaataaatgcattttttaatgattcattcgctgtctctttaaaatacagataattgttttgatttccttgattttgttgtgtgattagaacttttggctgcttttgctggaagccaaagaaatagagatgccctccagctggtgtagcatggtcgatgtccgaatagattgccacaatctgaaaatcagcttgtccctcaccattttctgaccactccaccgagactggcgtttgattaatgacggttgtccatttaccatcaaaaatatcttgaggtacttggagaccatagtaattcgcttgcacatggtcgtcatagcttcgatattgctgccccatttcttgtccccaactctgcataaacgtcgcaagctctgcagacttggaagcatcccacaaaacgtgtgtcaccggttgacttgcttgtgcagtattcgtggaagcttgtggttgtgcgctttgctcatttgacgattgttgttcagatgattcagtggtcctgcttttagacgcttcggtactcgtagcgttagctgttttggttgaaattgattgagacgtgcttgactccgttgtcacgactttttctgtagaagatgtttcctctgttttatttgcggaacagccagccaaaaaaaagcagtagacccatcgttgttactagcattttttttcatttattaaaccacccttaaggagtattcagtgtacatatagtagcagaccatatactaaatgcttactaaatttttgcgaagttttttctcacaacttcctcatacatgagattgataaataacattacatggcattggtatggatttagaactgcgaaggttacttttaggaccataaaaataaaaaaacagtttagtgtagttgttttgaaaacattgaatcctttgcgcttttcttcgcaagtttgcttaaatatttcaactaatgacaaaatgctcgtttgttccctaagagttgcggttcgccttttttgatgcctttggtcgactagctatttttcccagctttgcaataaaatagtccaaccatcgaatcaagatgattggaccttttgacgcaagttgcctttccaaacaactttgctctcaattttttttgatgtttaatccttaattattttctttaaccaaagaagctccattagtcgcaatcacctgtttgtaccagtaaaagctatcctttttaaaccgatcataggttccgttcccttcatcatccgcatccacatagataaatccatatcgttttgacatttgagaagtcgatgcacttactaagtcaatacatccccacgtagtataacccattacttcaacgccttttctgatggcttcattgaccgctttaaaatggtcttcaaaatactttatgcgataatcatcatgcacttttccatcttcaaacgcatcaaaagcaccaatcccgctctcaacaatgaacagaggcattctataacgatcgtacatgtcgattaatgcaattttcaatcctgttggatctacttgccaaccccaatcacttgtatcaagataaggattcttcacactggtgactaaatttccgccaactttttcccgatcttcttcatcttctgttttaatcatagacatataataactaaaagagacaaaatccactgtgtgttgctgaatgatctcctcatccccttccaccatttcaatggaaaaattgttctcttgccagtaatttttgacaaaagtcggatacgttccaaaaacctgcacatcagaaaaaaagtagttctcccgattatgttgttgggctagcatcacgtccactggatttgaggttaacggataagctaaagctcttgtaaccatgcaccccacctgcgcattaggaatgatttgatgggcatatttagtcgctagggaactagctacaaactgatgatgtagcgcttgataaatggcctcttcagcttctttttttgttttgtacttttcttccaccactcccatcgtagtgaaggggtgtctaaagacgctatcgatttcattgaaagtcagccaatagtttacatactttccgaaatgttcaaagcaagttttgctaaatcgtacaaacatgtcgatcacttctcgggaaacccagccgtcatattcattgactaaatataatggcatttcataatgagacaatgtgactagaggttcaatcccattcttcttcatctctttaaataagcttacgtaaaaatcgattccagcttgattgggttcactttcaatcccattggggtataatcttgtccatgcaatagatacccttaagcatttcagtcccatttctttaattaatgccaggtcttctttgtaacgatgataaaaatcgattcctcgtcttttcggaaataacttatcgttttttgactgcatggcttcctcgatttgttcaggagacacgtgccattgactgatataatctgtcctatctacatcaggtttgtacattgcgacatctgctaccgacatcccttttccatcaacgttccaagccccttctacttgattcgccgcaattgctccgccccaaagaaagttcttgggaaaatagcttttattcattcgattacctctttcagattgttgtttttatgctattatttctgtttgtatcgtttttttgccagtgaaagtttggatgattttacccttagagtcgataatgtctacctcatcaagatcatccaaattggttactacaaggatcgtggttggatcatagccttcagactggatgccttcaatatccacacttccgattctttgccccttttggatgtcatcgcctgctttaacagctaaatcaaaatagttgccgtttaattcaacggtattgatgccaatatgaatcaatacttctacaccagatgttgactttaatccaatcgcatgttttgtaggaaaaaccagttcgacctttccactaaatggtgctttaattacgccatcagttggtattgcagcaaatccgtcacccatcgttttttctgaaaacactggatcgttgactttttctaactcaatcacttccccatccaatggtaaactgattgtattgacttgaccttctgtttcttcattacttgatgaagattcttctcccagtccaaaagcaaaagttaaaattgctgacaggaagaaagcaagagcgattccgatgaggtaataaacaaaggtatcacccaaaaaggctggtaacgttgttaatgctggaaaaacatagacaatcgcctttgtctgcattgctcccatgaaagctccagcaattccacctgcgattgtttgggcaatcaatggttttttatattttaccgacaagccatagacgatgggttcagttatcccaccaagtaaagctggtacaatcgcagatagcgagagcactttaaacatttttatctttgcttcttaaaaatacgcctaacgccacacctgcacttgcaaaagtggcagccgcaaccattggtcgaataacgtcataaccatagactgcaagattattgatcatgattggcacaacaccccaatgaatgccaatcattaccaagaaagtccatcctgccccaataatcaaaccagccagtaacccactgcggtcactgataaagttcatagcgcttccaatcccatcccctaatgtaacgccgattggtccaacaactaacacagttagcggaaccataataagaagggcaaccattggcaacaaaaaaatttctaaactctttggaatcattcgctttagcagcgtttctaactttgaatagaggtaaatggaaataatcgcaggaatgacagttccagaataccctattaaaattgctggaatacctaagaaatcaaccgtcacaccattttctgtgactaatgctgtgaaattaggctctaaaagtgctgctacaattgctaatgaaataaattgatttgttctaaacactctggccgcactaaaagccaaaaataacggtaagaagaaaaatacactattgccggctgctgaaagaatcttataggtacttccatctgctgacataaaatgataggtcgttaaaaccactaacaaggctttaatcattcctgccccagctaaaggcataataatcggattaaaaatggaagacagtgtattaaagaagcggatgaagatatttccagatcggtcatcatctaatgcttccgactcgtctgatcccaaggcgcttttaatgtcatagttagccatgatcgttttatagacatcttccacttcatttccaataacgacttggtactgattatttgcttcgacgacggacaagacaccggaaatcttcttaatttcatcggtatttttttgtgcaatactttcatcttttaacttgaatctcaatctagtgatacagtgataaagactaatgatattctctgttccaccaacataatcaataatacttttggaaagagcactataatttttccccattgttacaactcctatcaattttgtttatgtttgttataatacatgtgtaatatacaattttttcaacatattaaataaaaatttcgttttttggaaactctttcacagataggagctagtatttatgggacccttaattattagactattgactgttcttaacaatgaaacaacttcttctacctactaccatatcgctcagacacttttgaataactatagcattatcgataaatcaagtatctctgatatagctactttatgcactgtctctaaatcaaccatttcaaaatttgctcgttccatcggatttgaagattattatgaattaaaaaaatcctcaacctttgctgaaaataaataccatttcgacttaaattacatttcaaatattatcaatccaattgaaaaaaatggttatgatgattatttagatgccatcattaaagatattagtgcgttcaaacagcaaagcaacatgagaagtattgatgagttagcaaaatgtctgactacctataataaagtaggtgcttttggactgctattttccgaatcagcagccattgattttcaatacaaattggcttatgcgggaaagtttattattacttatcaaagtgatctcaaacaaatcgaattcatagaacaagccgatgaagagacactattgattattttttctaactctggcggttttttacagcgacaacaacttagagatgatataccctacagaaatgtatttgaaaacacaaaagccaagattttcgtaatcacagcaaatgaagaggttcgtaactatcgtttcgttcatgatgttattcttttccctcatgagactatttttcaaacccattcttttatctatcaaatcattatggatatcatcgttagtaaatatcgacagtatcttgaacctccaacaatctctcacaaacaataataacctacgaatgaaattgacaaaagaactgctagtgatgagaaacctatcactagcagttctttttgaggttttattttttaattaggaagaagtagtcatctaccattattagcaaatatgccggcaatacttttccaatgtatttcttctcaattgcaacttccatctaactattgtctataaggttttctttcttagaaaaatcaattatcagcatttttgttatttaagttatcccgtcatatcattttagtgttgggcttttcttgaaacacttttctaatgattaatatatgcaattgcacttccactaccaaatttaatctccggcaacgatcgtttgtataaattcagctctcttaacgtatcatctctttgagagagtgcacgaaacgcatagcgtgtccgtccgttttcgtttttcttcgatcctgaatattgagaggagactttatatgcagcaacaaccgcattatctgctccagtattaatcgctataatgtagcgaatccgatgaattttatcacgaccaattacccaattacctagcgtacgagattttaaattatgatcatcacgaaatttgtcgtcaatcggatattcatctgactcatctttacaaagttcaaaagcatctctcacttttactgctaagaccaactcatccgttgctatttgatttacagatatgggttgaaatccatatcgctcttctacctcttccactagcattggcttagaaccatgtccttttactaaattcgtcaaagagagtccttgaatcagttgagcataattaatcaacgcattttcactagcgtaagcttcattctcagttaatccatagctaagtatataactcaatggttgcagattcattccgtttatttcttggatagtttttatttttaatgttctagctgattcatcttcttcaaaataatcagattgacttaacatacttagagccgcttgacgatgtgcaaaaatacggttacctttgcctttcccaatataaaaagtctggttgtttctaggatcaaccaaacaataaacatagtaaggatgttgctcatctttttgcaacgcagctaaagtagatgcagaaaaatggttaagttcactcatttgttactcctctgttttactattttttctttcgtggagaaaacaccctcacttatgataaggcgcgcctgtattgatgcgaaaagcacgatagatttgttcgactagaatcagtttcatcaactgatggggataggtcattttgccgaaagagatttgggtgttgctgcgctgcatcacttcttggctgagacctaaggagccgccgattacgaagactagttggcttttgccttggattcctaattgctcgatttgctgggcaaaagcttcactggtgggatttttgccttcaatctctaatgcaaagacgtattcctggtctttgatctttgccaagattttcttaccttctttttctttcacttgaagcatttcagcttcactcatactttctggagctttttcatcaggaacttccacgaattggattttgcaataagcgcctaatcgtttcacgtattcattgatgccttgaatcagatatttctcttttaatttgcctactgtgacgattttaatattcatgaccactcaccttccgctatcattataatggaatttcttttcagaatatatgtcgcgtaccaattttttcttctatagtaccattgataccacgaatcgtttcaagtgactcttttcttactaaaaaaatgattggtagtctaaaaaaagaaatttcattgttttggtctaaatcctccctatcttcttcatatttttttcaaaatctcttagtagactattgtcagaaagaaagaatataataaatacatacaaacaattcaatagggggaataacaaatggtacgaaaaaatgtgacaccaggaagaaaaccttcttccggcttattaaaaaaattaggtattggcattcttggcggagtagttggtggtttgttgaccttcggcggactttatctggcgatgggctcttctttgacttcacctgtaacgaccgcaaccagcggtgttcaagataacaatggacaaacgaaagtctccaatgttaaatatgacgtcaacagcgatgtaacaaaagcagtcgaaaaagtgcaaggagcagtcgtttcgatcatcaacttgcaacaaaataatgcgaatggcctcgaagggttatttggctctggtcagcaaggtggtcaaggatcagggactgagaattcaggcgatgacagttcactagaagcttcttctgaaggaagtggcgtgatttataaagtagatggtgacaaagcgtatatcgttacgaataaccacgtagtagaaggacaagatggtttggaagtcgttctctctgatggcacaaaagtcaaagctgaattagtcggaacagacgcttacactgaccttgctgttttacgcatctcttctgataaagtagacacggttgcttctttcggcgattctgattcactaaaagttggcgaaccagcaattgcgattggttctccattaggatctagctttgcaaattctgtaacgcaagggattgtttcttctctgaatcgtcaagtaacgaatcaaaatgaatctggtgaagcagtcagcatcaatgcgattcaaacagatgcagcgatcaacccaggaaactctggtggtccactgatcaacgttgaaggacaagtgatcggaatcaactctagcaagatcgccagcacttctgaatcaacatcaagtgtcagcgtagaaggaatgggcttcgcgatcccaagtaacgacgttgtcgatattatcaaccaattagaaaaagacggcaaagttgttcgtccagcattgggtattcgaacaatcaacttaagctcaatcacttcgcaacaacaagaacaaatcttgaaagtaccatcttctgtcactgacggagtagtcgtatactcagtaaataacgcgacaccagctgaacaagcaggattgaaacaatacgatgtcatcacgaaaatcgatgataccgacatcagcacaaccacagatctacaatctgcactgtacaagcacaaagtcggtgatacgatcacagtgacgttctaccgcggcaaagaagaaaaaacagccaaagtcgttctatctgtagatacttcgatcaatgaacaatcgactgacagcagcaactaaattcaagtcaaaaaaagatctgccacacaaacaggacgtggcagatcttttttattattttccaactggaaaagcttcaccaacaacggcatcttgtggtaattcaagaattccttttttcaatggtgcatttgctaagtgcagttcacgagcagaacagatcatgccgtagctatcgacgccacgaagcgttcctggccagatcaataacccatccggcatcattgcccctggtttagcaacaacgactttcaatcctttgcgaatattggcagcaccacaaacgatttgcaggacctcgccttctccgacttctgtttccgttacagataaatgatcactatctggatgtggttcacatgttttgacataacccacaacgattttcggctctaaatcaattgccaattgctccgtaaagccagcttctgtgatcaatcggttcaaagtttccacttgttgtttcgtcaaaactacttgtccgtttccttcaatggcaactgtatcagaaatgtgaaagaagttccaacctacgatcgtaccttcttcatttttgatttgagcgacatttccttttcgtacagccgtttgttccagccctttatcatctgctgtgatcacgatcaaagtatcgcccacatattctttgttgtatgaaaaaatcacttgtcttcctcctcttacttattccgcccataatcttaacaaatttttgtctgttcgtcatgggaattttcttagtttacaatcgctgcacttcccaatccataaaaaaactgcgacagaaatcagaccaacaggcagctagtgaatgaaaaagcactcgcttgctcttttttcctgtctctgtatcttctgtcacagctttgtcttttgcttattcttcgctaggagagacaaccaacacatcacatttcgcttcgcgaataatataactcgctacactcccggtgataaaccgctcaactgcattcagtccggattggcctaccatgatcaaatcaatcccatatttttctggtaactgtttggccattgcttctttcgcagagccgtaagcaatgatcccttcgatcaaatcaaaattaacggatttaccatattgtttacaggattcgattaattcttgggcagtatccttttcctgctcaatgatcgttgtatctaaaggagcatatcccatcatcgtggggatctgctgatcgatgatattcgctacatagactttcccctgattgcgtcgtgccacttcaactgcttttttgaacgcttcattggcttggtcggagccatcgacacctactaaaatattttgatatctttgcccactcatgtttttcacctcgaaagtttaatttagacttgataagaaagattcgatttctgcttttgtttttcgatctttgttgactaaacgaccaagttctttgccgtcttcgatcactacaagacttggaattccaaagatattccattccacagccacatccatataagcatcacgatcaacttcaacaaattgaaattcagggaaatctgcttcgatctcaggcaattgcggtttaatataacggcaatccccacaccagtctgctgtaaaaaagaagacattctttcctttttcgacatatgttgccaattcttctaaattttttggaacaatcacacgctcaccactttcttttctctaatcaaattatacaccttttaaaacagggaaccaactcacaagcaaaagagctgtgaacacgcccatgctagtcactgaaaacagcaccctagttgtcccatttcctgattatcgtaaacagttacaataacagatcaaaaattgaaccaaataggtctgatctaccgttgagtcgtatcacagctcttaatttttattttccttctacaattgtagcaactgttgatttatccaaacctttcaagacttggatcaccatttctctcgcagcatcaaagtcagcgatgctgaatagtgtttgatgggtatggatataacgtcctggtacaccaatcacagaacttggaattccttcattggccatatgagctgcaccagcatccgtaccgcctttagacacaaagtattggtaagggatattgtttgtttctgctgtgtccagcaagaattctttcatccgaggcaacatgatcattcctggatcatagatacgcatcagtgtaccttcacctaaatgcccaaaagtcccattcttcgtcactgtatcatcagctggtgaacagtcaacagcgaagaatagatctggttggaatttcgtgacagaaggttttgaaccacgtaagccaacttcttcttgcacattggcaccagcaatcaatgtatgacccagttgttcttctttcaatgcttccaatgcttctaatacaaccgtacagccataacgattatcccaagcttttgaaataatgtttttgccattcgctgtcttgattgtttctacttgaggtacgatggtgtcacctggtcgtacgccaaaactttccgcttcttctttagaatcaaaaccagcatcgaacagaatgtccgttacttctactgctttttgtccagctgttccacgtagtaaatgtgggggcactgatgaagaaatacatggatagttgcctttcgcagtttttaaagtgaagcgttgtgctgaaacgacataagggttccaaccgccaagaggtgtcactttaaataacccgcgttcggtgatttgtgtcaacatgaatccaacttcgtccatatgagcagctagcatcacgcgtggtgcatctgcatctgaatgatgacgtaatccgaagatcccgccaagtccatcttgttggatttcgtccactaatggagtcatcgcttcccgcatataggcccgaacatcctgttcaaatccactagttccttgcaattctgttaattctttgattcgttgaaacgttttttcttccatacttttttcggcttgaatcgaaacaagccttccctcctcttgcaaatctatatttattataacgcaaattactcattctggttcttttcttatagaaaaattctaaactatggtaaaataatctaaacagacaaaaggatttccgtttattccttaacaggataggagaagtcttcaaggaggcacaacatttatgatcaatgaacgtccattcaattattttaaaaacggcctggccatcggcgtgggtgtcggttttgcaggcgggatcttctcgacattatggatgaagaaaaaacaatcgatgaatgcagatgacgtcctcgatcaaatcaaagcagcatttttaaaagaaggtccgatcgaaggttcctggatcaattttgagaagcaaccccttcgtaaatttgcagtgacatctcaaggatataccggcggtattactcggaccgaagacggacaactgatcacttacgaatttttagcagatgcgaaaacaggaactgttttggatattcaacgatcgatcattgattaatacgcattgctatacaacagacgctcaatgattcaaactcataaaatagtcgaacatcgctagatgatttttcttgtcgttctttatgaacaacagtgatcatcttgagttgtccgactattttttagttgcagcaatctttttgggacgtttatttgcatgaagcaacgttgctaagtctagtaataaaacattggctaacacaggattggctttctcgcgatacgctgcggcgccactttcaaacaatactgctagacgatcttctaaaacaacgatttgttccaaatacggtggaaatttgattcgttttaggatccggctaggagagtcccgctcggacactaagagttccgaggtataaggaccataagaacgactggctaagagataatggccataaaaagccacaccttgaatcttatcagatgtttttctgctcattgtcacggttggttggattttgtctttgcggcgaattgctgttttcttttcagctatcgtcggcaatagatagaaagtcaactgtccttcaccttttagtgtgaagttgccagataccagttgatcattgttttgagtcaaatacgatgcttgtggaatctctaagagatcagttgtcagccaataagcgattggctgtcccgtctcttcagatgtatctgctaagatatcgatcaaacgtaaagcggctactcgtccagtagcagatcctgtgattgtcaaccataaaagttcccgttttgtatcatatactaagccccctacatgtggccgtttaggtaaaatcagcagtttgatcggctgtcctgtttctctatccagtacatgaataatagaatgatgctgatggtcatagcagtaggcagaaataaacacaaaatcttgagaaaaagccaacccttgcggcgtcatccattgacaaacctcattttcgccggtttccggcaccaccattcttgtttctgttaatccaggaatgttatattgttttgcttcagccttttcccaagctgcttgaacaataggataccgttttaactttttttcaatatcctgatgtatccgttgctgcttccaatgcttaaactttaggacatagtaaacaaggaggccaatgaccagcaacactaaaatcattattgctacccgctgagtcatttgtttgcctccttgttctattcgatcaatcgtacatataccgctattaattacagtatctacatgtttcttttactagcgtttctttataggatctttcataatctcatttatagtaacattaagaatcccttattctactatagtcacttccacatcaatattgcctcttgttgctttagagtatgggcaaaatgcgtgggcttcttctgcgattttctctgcttggtccttctcaagtcctggcaaagaaacttctaaaacaaccccgatttggtagcccccatcttctaattgaaataaagatacccgtgctttgacttcagaatcagactcaagattattttcttccagcatgtgttgaaccgcgccgttgaagcaagatgcgtatccagccgcaaatagttgttccggatttgtcccttcactatggattcctgggcggtcgatcttcatgtgcatacttccgtttggtgcctcaacctcgccatcacggcctccacgattgatcattgctgtttcgtacatttttttcattgagatcatcctttctttcgtcgttctatattaagtgtaacgagtattttttaatctgacaaaggtaatgcttgcattcgacgacatcagttagacaacatcgatgatcagtgatagaagcagtttgtctatacaaaaaaagaagcagcgaaaagctgctccttaagataataggtaaaattgctgatatatttgacgattaacctcttgaacgtcccaagaaaaatgatactacagcaacaacgatgatcgcaccaatgatagaaggaatcaaagccattcctgctaattgaggaccccagctacctaacaatgcttgtccaattgctgaaccaactaaacctgcaacgatgttagcgatccatcccattgatccacctttatttgtaattgctccggcaatcaaaccgataatagctcctacgattaatacccataaccaatgcataattttctccttctttctgtgaaatatttattacacatattatgttacgcttcttcttaaaaatacacaaaaattttgctcttaaaaaaacaaaaaaaatttaaaacgttgttatattaaggataaatcaacttttttggaatcgttaacactcactgcaagaggtcaaaaaaactgccgcagctctttgaaatcgttttgatcagcaaaaagttattttctgataaagggtacctagactatgtacgattttctttcattgtctgctttcaaccgtcatcttccctatgaataaaagcaatcaaagaaaccagattgtcgtacacacctcattcactacatccttctgatgaaacatcaaaacaattggcattcctttgattctgccttttgtatttgaaacctgcttcccctcactatgtaaaaggattatgagaaaaagcagcgatagaagtgagcgtatgcaatagcgagtaaagtaaaaaataaattgttcggattgtaccccggcctttcttcttaatatttttcatttctcgcttctcccctctgcttattggacagtcttcgcgattgtgaagtcacgaaaaaaagcaactttgcccagcgttcaatgctagacaaagttgcttttttattttgtttttgaaaagtctttctttgaaagatagacagcagtaaggatgcctactaagacagctaacccaaagactagaatcgttcctatcgtgttatccttcccaggcagtccgccagtgttgatcccccaaagtccagcaattaatgatggcactgcaaccactaatgctgctgaatctaaatatttcatcaaatggttcaaattattgtccatcatatccgagaatagaccaccgatggtttccaataaatcgcgatagatcgtgacaagcttgttggcaaatttctgtcgcagtttaatgtcgtaaactaacgattcattatctagtttgtctaaaaactcttttcgttccatcaagtgattcactgtaagattctgatctttcaatgtgtgatccaaataaaccatatctcgttctgtgtctgccagattaaatagttcattattttcggttgttttacgggcagccgcatccaattggtcgatttgctttttaatctctttcaacccattgataaagtgggtatagatcattaatgtggcaaaagcaatgatatcctcaaaatgtcgaagctcatttccatgtttctcgatcaatcgctcaacgagattcgattctctagagacataggtgatcatcaatcctttggaaagaataaatgtgacaggttcaaggcgtttttcaatgcgttcttgatgatttgaagaaagatcgatcaatgtataaagaaacggattgtttaatttagtgtctcgtaaatgttctaatcgagaaacttcctctggttcatcggagccaataaaaatatcttccggtaaatcaaaaagtgtcagcagctcttttttttcttcttcatttccatgtttgactaccaaccaattatagtcttcttcggatgattctctgatttggttctgttcgattttatagtacgaatacattttgcctctctcctttaactccttcacttctcttcaactatctaatggcgactgctttttgtcaagaaaaagcgctatttcaacggtttttattaatacggaaataaagcaagcgtttgattagaccattctaaataaacgtgagagaatatttttgggcccaataaaaatcattttagaggaggacaactatatttctacatcagaaagaactacagttcgaagcaaaaccagacaaaccaaatccattaattgcgaagtatcttcaagaattgatcggtggccagtatggcgaaatgagtgtagcaatgcagtatctcttccaaggttggagctgccgtggagaagaaaagtacaaagatatgttgatggacattgcgacagaagaaattggacacgttgaaatgcttgctacaatggttgctcgtttattagaaggtgcaccggtagaagatcaagaagccgcaatgaaaaaagacccagcaattggcgcaattatctctggaatgaatccacaacatgcgatcgttgctggcttaggaccacgtccagctgacagtgtcggtaatccatggagtggcgcttacatcattgccagcggtaatttactggcagacttccgtgccaatttaaatgcagaatcacaaggacgattacaagtcgctcgaatctatgaaatgattgatgaccgtggagttaaagacctcttatccgtgctattagctcgggacagctatcaccaaaacctttgggcacaagctgtcaaagaacttgaagaaaaagagggtacaatcttagtaccgagcactttccctcgtaatgaagaacggttagacatcgcctatgacttttacaatttctctgaaggagatcaaagtaaagaaggctcttgggcaaaaggaaaagcacttgatggcgaaggtgaataccaatggctttctacacctaaagttgaaggcaaagcgccaaaactagatcctgtcacaccaaaaatgtatggcacgccacctgaaaaataaattgatcgaaacgaataaaaagagcaatgattccattcacaagaaatcattgctcttttcttgtcttattgagcaagttggttaccttaaagctaaaaaagcgttagagtagaatgtataagaaaaaggaggaatcattatatgaaagcacctttacttacactaaatgacggcaatatgcgcccagccgtgggcatcggtacctatcaaattcgcggtggcgaaggcttaagccagttgcaagcagcgattgcagatggctatcgtttgattgattcgtcaacgaactatgacaatgaaggaatcgtcggtaaagcgattcgccgatccggtgtccctcgttctgagttttatatcacctcaaaattaccaggaaaatatcatggatatgatgatgcactgaccagtattcaagaatcgctggcgcgcatgggattagattactttgacgcctttttgatccactggccactgcctaaacgcggcaagtacattgaagcgtggcaggcgttagtgactgcgcaaaaattaggtttgattcgttctattggtgtatctaactttgaacctgaacatttagatgccattattgaggcaactggtgtcactccagccatcaatcaaatcgagatccatccttactgggtccaagaacaaatggtagcagaaaacagaaaacgtgggatcattactgaagcatggagtccattaggccgcggcagcgcggcgctcaaagaatccatcatcactgatctagcaaataaatatcaaaaatctgcgggtcaagtcatcttacgctggcacgtcgatcgcgggattctaccactaccaaaatcccgaaacctgagccatcagcgagaaaacttagctatttttgactttgaactgactgaagaagaaatcaatgcaatcaatcgcttgaacaaagaagatggacgtattgaaggtcaagatccgaatgaatatgaagaatttgagtaaagtgagacagcacaaagctcctgagggatttcataggctcacatcaattataggaattggaatggtcacaaaaaaagaactgcgagatgacttgccccaattgaattccttagatctactagcagcaaggctctactgaagtcttgctgctattttatgagaagtaaaaacttctgacacgatcagttttcatttggattatgcttttctcacagttctttttctgagttaaaacttctgtacaatcagcgttacaactgataatgaatggcttctttgtattgttcaaacaatgattggttcaattcatcgccgccatccatatttgcggaataaaagatgggcggataatcgattcctgcttgtttcaattgttggcaaacttcgacgataatggtattaaggatcgtagcgccaatcaccgttgaagtaggccccactttttgatccatccccttaatctgacaacctgcatcaccaatttctccatgattatcgattacaagatcagcgacttcaaacagacgaaggcccgaagaatggcggctagtgactgattgcgaatacgttttgtttgttaaagcgataattttgacgcctttttcttttgccgctagtgctaaatcgattatgacaggattacgacctgaaactgagtgtaaaatcagcacgtctccttctttgaacggctggatttccgctaatgcggtgccgtagccttctagtcgttccattttgctagtaaaggtgatgggactgcgatccaacatcagttctcgtccaaagatcgcattgatcgtcatcatccctcccgcgcgatagtacatttcttctgccaagatccccgcatgactagccccaaaaatataaatcgaatgcttttctagatttgctgtagtcaagagacgaattgcctcatcgattgcatgctgttcctttttttcaacggtttctagtaatgcatgaattttatcaacatattgatacatattaaattcccccaaatagactgccgagaccacgaccaatgattccccaaagtgataagtcattgccaccaaagatcagaatccagttttgaatcgttgtgctgaatagaacggcagatacaccaactaacaagaccatcacaaatgatgcggcaatggtaccaatgactgcgccacgcaagccgccttgtccttctccaataactgctgcgccgccacattcaaagaaactggtgataactaatggtacgatcaagattccaaaaacattcgtcgtattgacaatgatcacaaggatcgttgaggtgatcatagctacgataaaaccaataatcacggcattcggacgataattgaataggatcggtacatcaaaagctggtttggctccagggacgactttttcagcaatcccttggaaagctggaataatttggttgatcaataggcggaccccataaagcatgatcaagagtcctgcgccaaagttcaagcctgcttgaacagcaaacatgaccagattcccaccttctgggacaagaactggtgcgataattcctacaacaatattcatcaaaaacatcaccaaggcacctgtaatggaaatctcacggaaaaaggacaggttttctggcacttttaaatcttctgtcgatttttctttgtttcctactcgttttgccacgaagccggacaccatcgataagatccctgtaggatgtccaatcaagaacgaatcatcgccagtggcatcccaaacatatttccgcatgatccaaggcataaatgaccaataacaagcagataaaacagctcctaaaatcaataatggaatccccgacattccaccttcaaccccaccagcaacgatcacaaatgggaaccaccataacatatgacccgtcaagaaaatcgtcttaactggtgtaaaacgagcaatcaataagtgcaagatcaatccaaaaaacatagctaacccaacagttcccccgtattctgctgtgaaggtcacatcagaaagaccatcggctacttgaacccccaactgtgtctgaaccgctgtgttgattggtgcgatcgttcccgtcagcatattgacccctgcggtcaatgctaccatcccaaaggctgctgtcaacgagcctttcaccacttcggcaaaaggttttcgttgcacgatcaacccgatcattgcaatcagtccgagcaatactggcggattctttaaaatatgatctgtgacaaaactcatgattatccctctctttcagctaaaaacttttccatttgcattttgacttcagcgacatccatatattttttgatgggatagacaggtgctttgacggaagcttgcaaatcattcaataattcgtggcttgtaaaataaacatctgcaggagttgcttttgcagtagacaaatccgtattctcagcagtcgccttcagccccagctccttaatcaccttatcgatcgtcatctttaacaccattgaacttccaacaccaaatccacacacagctaaaattttcatcttcttttcctcctattggaataattggcaaatctgttctttgttaccattcaaaataagttgatacttttcctgatccataaacacttccatgatttcctgcaaactttccaaatgactttgattgtcttttgcagctaaaacaaggaaaatacggaccgacttgccagctaaatcgatttcgtttttagtcactagcaaactcatcccttgatgaaagacaccttcccccggacgagcatgcatcaatgcaaagtaatcagccaataccatatacgggccattctcctcaacgctatggatcatattagcgacatattgttgatcgatggctttttcatttaatagcggctgactcgccaattgaactgcttcttgccaagtgaggatttgattcgtggtctcgatatgatcctcaggcagtaatttttttaaattgatcatgattttacctccaacatttttgaaatgaaccattctttgtcttcgatcccttgcatgatcaacttcatgacaggttctacttcttgggcctcatcttctcgtatcattagtaacacgatgatatcgactttttggttgccccaatcaacaggacgatccaaaatcaatacagaaaaggtcgtttttgaaacaaactcaggattgccatgaggtatggcaaaaccgttatctaaataggtcgactgcaatgcttctcgttctaagacggaacgctgaaagtccgtacgctgattttccgacgaaaagtcattttgactgatcagaaaatccagtgcttgttctttggtctcaaatcgttcaaaataaatcttcggtgcaatcaacatccgtgtatcttgcaggattttcaccttatccgcaatcggttcattatcaataatcaaatcgatatagtgattcatgatccgcttcatgtctcgattggtcaccatcggcgagatgcggacgactggtttggaaacatcaggtaaatcgatcgtggaaataatgaaatcgatggcagaaatatccatctctttgagcttagcgacagaagcggtttcaatactatcgacattaggcaatattcgacgaatctttgcagaaataaatgaactggtgccaacaccgttaggacaaacaaagacgattttattcaattgccgcatccgttctactgcagcttgaaagtgaatcgaaacaaacccgatttcatcctcagatattccaatatggtaggcctttagaaagtcgttcaaagagaaccaaacgaccccatacaacgccggataatgctgtttgatctcatctagcaatggattgactacagtagtttgggcctcaatgcgtaaaaacagctggtacaaatgaatcgtcaaatcttcttctaagcgactatcctgtgtcaaatcgatctggatgccttcactgactttctgaatcagatttctgactttccctcgaaaagagaacggaatcgattcgttcttcataaaaaaacgtaagccactacctacaatgagataggttaggtactgaacttctttcgatgaaaaatggtagatttcttgttcttcaatttctttcaacaattcataaatcaacggatacttgtcaaattccaaaaacaattttccaaattggcgcttctcttctatatccagctgatttgcctggttcgagcgctcgacaatcagcaagatcgaaacaacgatgctttggatgtagctttctgggatctccatttgcttttcggtgatcgaatggcgaaaagccgcatttatcttttcaaataatgacacatttgtcagaacagaaagattctccccatgctccatagtaaggagaatgaatcgcttcaacattcgttggatttgtgactcgcttccttgaaaataagtgcctgaattatcaaaacgcaacagtaaattttctttgacaaacagtgtttttagataagcgatatccttggcgatactgctcctagaaacataatactcatcagaaagttgctggtaactcaagtgctccccattgatcagccgcttaaaaatttgcatgcgtcggtcttcgatcaaagaataattgtttttcatttgctcaccctctacctttattctagtgataccttaacaaatatgaagaccaattgttagattaaaaaatgattaaaaggtgtgcacaccctttcccttgatagcaatatcggtcgtttgttccgcaaaatcgcttcaagcaagccaaacttttctcatcttcctcgttttctcttataataaatgtaaacagtcaaatgaggaggaaacaaaatgaaatggcgtgggggtagacaaagttccaatgtggaagaccgctctggtcgttccgcaggttcaggaggaaaaataatggccggcggtggtatcggtacgattgttatcgcagtcctcttttttctattcagtgggggtgatttaaactccgtcacagatattttaggaggcggacaagccgctaattatcaaacagaaaatgtggcttcagacgagtatacagaggaaaaagaattctccgctgtcgtcttcggccatttggaagattattggaatggtgtttttgaagcagaacagactacgtatcaagatcctaaactggttttatttacaggaagtgttcaatcggcttgtgggaatgcaacttctcaagttggtcccttttattgccctgccgatcaaaatgtttatctggatctcagctttgcaacagaactttctcaaaagtatggggccagcggagattttgccatggcctatgtcattgctcatgaagttggtcatcacgtacaaaacgaacttggtattacacagcaactcgataagatccgccaacaggtttctgaaaaagaatacaatcaatatagtgttcgtttggaactacaagcggattatttagccggtacatttgccaagtatctacaaggaaaaacttataacggccaaccgattttagaagctggtgatatcgaagaggctatcacagctgctaatgccattggtgatgatacgttacaaaaggaataccaaggatatgtcgtaccagatagttttactcatgggacttcaaaacaacgagttgaatggttcaaccgggggttcaaatatggtgatttggagcatggagacaccttcaatgaaaaaaaccttgatttggtctacggatcgtaacaaaaacgttcctttttagtcactcttttttcacatttgggcggtatagtttattcataccaacaaaccctaactttttcattttactccttgcctgctagtccccgctggcaggcccttttttttcatggtgctattttagtttttttttaacctttggcctgtttttttctttaaaacgctaagggttgatcacaattttttcatattttccggttactatataaataacccaacaaacaacccaactttttcattttttactccttgtctgtcagtccccgctgacagacttattttttttcttgccaaaattctcaaaatgcgctaaggttatttatgcgcggaagtggcggaatggcagacgcgcacgcttcaggcgcgtgtgagtatatctcgtgtgggttcaactcccatcttccgcattttgagcagatcatcttggatgatctgctcttttttatgtgtttcttttgtctaaataaagaaaaaagcttaagctagaagtatatcaataggaaaaagacaggaggaaatccaatgaaagaagtaccaacagcgaaaatcaaattaactgaggtcaaagaactctttgatgctggttatgaaatcttaggagaattacggtctgaggtgaatgccccagtcgttagagctaaatttctgaatcaagaagtgattgccatttatggaaaagaagcagcaaaaattttttatgatccacgaaactttaaacgtgaaggagcaatgcctaaactcgtccgttcaactttattaggggaagagggggttcaaactttagacggggaacaacatcaccatcggaaaaactactttatggacttgatgacacctgagagaatgaccgattaccatgatttgttggaacgaaacctttctcatgaactggataaacaatccggtacctttgagcttttttcactcacaaaaaatgttctattcaaaacgatttgtgaatggtcaggaatcaatctatcaccactgtctcaatcagagatcagtgagttagctgattatcaagttgctatgttcagcgggactgtcacctcccctgtcgcccatttaagaggcgtcgaagatcgtaaaaaatctgagaaatgggctcaaggattgattgaagaagctcgtcaacatcctgttgctggcaaagaatcattagcactttatactttcgctactgccactgatcttgaaggtaatttactgccgatcgaagttgcagccgtcgatctgttaaatatcatccgccctacggttgctttaaccgtttggatcgctttgatgggacatgccctttttagtacaacgactatctaccaagcacttaaacaaaacttttcggagttacaggattcatttattcaagaattacgccgcttttatcctttctttccaatgatgcctgccattagcttgcaagatgttgtcgtcgatggttatctgatccctaaggacagctgggtcgtccaagatatttatggtacgaatcatgatccgagaacctttgatcagccagatgacttcaaagtggatcgctttgtcggacgtacacaagccatttcctatgaggaagaatatgaaatgatcgcacaaggaggcggtgatttccgcaaaatgcaccgctgtgctggtgaatggattaccttgcatacgttgcgcgtgttcagtgatttactggtcaaccactatcagtttgaagttcctgaacaagattggaagattccaatgaatcactttccaacctatccagaaagtaaagttctcttatttaaagaagctgcaatgaccacagaaaatgagtaactactgatcgttgttattaagtgcagctcacaaaaacgcagcccaagcaagcttagggctgcgttttttgcttacttctctacagatgccgtacggaaataaaaataggcaccgtatgcgggaaattggatatctttgatcgttgacctgatcatataatttgatgcactctgatatagaggaacttgagctgcatcttctgctaacagaattgattctgctgatttgtaatcttcaaatactttatctggatcattggcatccacggtacgtgcgttttctgtcaatgccgtatagtcctcgttgacatatccaccgtaattgtaagaagaaccttttttatataaattgaaataagattccaagtcactgctgccagcaatccaaccagaaatcgacaactcatattgaccatctgctcgtgattgattcaaattcgttcgtggttgtttattgattgtaatcgtcaaaccaggcaaatgatcttgaagctgattttgcagatattcaccgattttttgtccatgatcatcatctgttaccaataaagtcagttcaattttgtcaccgatagctgattgtgcttggctccattctgcttgtgctttgttactatcgtattcattgtagtcgccactataagtgcgaaaatcttcattggtattcggattggcataaagcccactgggaataaggccattcaatacgcttgctccatcgttcaacacatcattcacgagactctctttgtcaatcgccaaagcgatggctttacgaaggtggacatttgccaatggtttatttgcctgtttattaaaatctaaaaaatagttggcaatatccttttgagtgactaaggagtcattattttggtactgttgcacatagagtccgctgattttttgcagatccaactccccgctttcaaacaactggattccagtattctcctctttgatcgtggaacctttgattttatccaacttaactaccgcttgatcgtaatactcaggatttttggcaagcgtccattctgcaccggtctgttgccagtctttcagaatgaaaggtcccgtatagagcaagtcttcacttgttttcccatatgccgtccctttttcttcaacataagactgtctttgaggcgctaaccagccaatcgacaccaccgataaaaaagaaggttgcggctgttccaaatggacgacaaaggtcttttcatccggtgtttctaagccaatcgtcgcaatgtctgctttcccttcgcgaatatcttgactgttgacgacattgtctaaaagatacgcatttggccccatggttttaggatcgaccagtttcttccaagcataagcaaaatctgctgcttgcacttgctgcccatcactccatttggcttcttcctttagtttaaaggtatatgtcttgccatcttcactgatgactgcttcctccgccaaaccgggaactggctgactcttttcatcaaaacgatacaacccttcaaaaagatgctggataacggtaaacgtaactttatccgttgtttgcgtcgtatctaatgttgtcaactctgccggtaagctgactgaaatctcttgaacttctggatctgtctcctttgcggacgatccagtcgtgctacatcctgctaacaaaaaacttaaaatccctacaacaaccaaaccctttttcatttactctcctctttccttttcacttgcgagttgcaagcttgattaaataaaaaaatcctcgtccctttgctgatcatcattgatcaacaaagggacgaagacttcgtgttaccaccctttttcgtgtcatttttacaaataacacctcatcagtacgtatgcatactcggcaggataacggctgcgttccgtctaaccaacgtaaaccagttaaaagactctgagctcatcttcacttagcgttctgtcccctttctcaccaacccgggttctctttaaacagtcatcaaagctactcttctcatcgatgtcctatattctactgaattgataaaagtatactattcctcgtttttcaagtcaaacagtttttagaattttcaatcttttcaataatggcttcaagactttttggagggcaaatacttgccagcttagtgttttttttctaggataaagaaaagaaaccttgctcgaaaggatgaaatcaatgaaacttgctgaagcattattactacgaagagatcttgaatccaaactcactctgttacgagaagagattgccagtagtgccgtgatccaagaaggcgatacgttagaccgcagcatcgacgacttactgctggattatgaaacaacaaaccaagaatttgcccagttggtcattgcaatcaatcagcgaaatgcggtcgccaaaatcggtggacaagaaacgattgctgctgcattagagaaacgggaagctttaaggcgttcgcatgcgatgctaacggcaacattggaagcagccaaggttgctccacggatgggacgtaatgagattcgtatgatccgaacgatcgataccaagcaaatcaccgaccgtttgaatcaaaccgcaaaagccttacgtgaattagacgggcagattcaacaaacaaattggcttgttgatttataaaacagctgggtgggagtcaaaagcgagcacaaagcaggtacaggcttatatgtacaccaatggggtctggcagggaccagtttaatgactgctgttcagttacaagcgtacaacttatatttttcaattaacgaccacgtgctggtttgacaaggtgggtgcctctgtttatcttttgttacgcaaaaggtaaacagaggttttttgttcagcaagacctctttcaaaagaaaaagaccccctgatccgtttccaacataggaaaccagatcaaggaatctttgatcgtttagctagttactttcttttctgtctgcgatataccactactacaatgcctactagtaacaagcctactaacatccagctgacttgatacgtttcaccggtttttggcagttcgtttttcttcgtcggtgtttttgtattctgattttttgctggatcaggagctttttctggcgtgtagcggttagtaaaggttggctcgctaccataatctgctttcgcttccaatgttccgttttgatctttgacatttacggtcactggaatctctgcgtcatcataagtgattgtactgtcttgtccggctttttcccggatcgtatagttgtactcaccggctttgtcgtacggaatcgcatcgaagtaaactttccctgtgccgtcgttggtttggctttgaatcacttgtccctcttgatcgactaattcaaaggtgaactcccctgcgactagtgaacggccagtcaaaactttctcagcttccaacactacactgccggcttttggtgtgtaagtgttcgtgaagacggcgttgccttcataagtcgctgttgcttctaactgtccgtcgttatttttcacctctactgtaacattggtgattgaatcatcatagctaatcgtagcgtcatgtccttgtacttcataaattttatatcgataggttccttcttttttataagtaatctcatcaaaaagaatattatttgccttgttcgtcttttcttgaaggattttattttcttcatctgccaaaacaaaagtgaattccccgtcttcgatctgtcggccttccaaagctttcgtagccgttaaagctaggctagtttcgataatttcccttgtattagctagttcaaagacataatcgacttcctcgttcgagatcgtaaacgtatattctttttcatcccgctcatatccatctggtgctttcgtttcttggattttataatctccatatcgtagcccatctaagtggtcaaattcgctagttccttgaatcaacttattatttctgacaacaagttcggagaaaacaacttcgtagtttccttcggcatttttacgactgagttggaaatgtgcctctttgttgatcccagcttccttatccccttctctgtcatatttcttgattgtcaacgagccatttgttcccgttgaagtaccgctaccgttggtagatttgacgattacgtcttttgttacttgatggatttccgtctgacttccgtaaagagacacatcatttgaaacaacttcattatttcgaatgccaggatcaagtttcgtttgataaacgatgaagtatggactgtcaatgacatcctcaaaagcaatacgtaatgtgaatgttccatcaataccattcgttgttacatttggattgtcttgattattgaaaataactttctcaccttttatccattgatctccgtctttgacggctttatacacatcaacaaggacttttcctgtctcatcgtacaagaaagtctgttgattataattgatcgtatcttcaatcacagcattcttgatcgttcgactatcttggttaaccagcacttcccaatccaacagtcgattattgtcaacattttgagtgccattttttgttaaccagtttccttttgcggatttctcaacttgcgcttcagcagttaaatccgttgtaccatctgtcaaagagatcatattattgtacttgtaaacatctgtagctgcttcgacagcaatgaagacagcaatcgtttctgaagtgtctttcaacagttctactgtcacttgttttgtcactggatcatacgtcaagcgataatcagctgagctcaattcttccttcagagatcttacttggtttcctgttccggatacgtcaactgtataaactactgcttctttaaacgtttgaccatcttgtaattgatcgacaatcttggttccttcatgaagtgtcgctttatacgtattaaataatcccatccaatagatttgatcacttgtagcaacatcttctgaaaagatatttgggaaattacggttaaaagctgcttgcaagtatgcttttacatctcctccttttggaatgaaaagccctgcttttagcgcgtttaaggtccaagtagtgtccatccatgaatttgcttgagcggcttccctataagagttaccgtcaatttcataatcgacaaaagcagaattactaaaacgtgttttggcacttcctaaagcgatctgtgtcgtcatatcaaaagtcgttttgaatctgaccgtaattttgtctgctgtctttgcatagtttccttttagtttaatttgaaaaccagattcgtactcaattggattttctccagaagtggtttcacgctgcttcgataaatcaaagtcgcttgaagtcaattctttaacttctcctgactggctagttgcagttaaaacaagagagtcttcaatcaattctaatccactaatatttgtcccgctaatttctcgatagcgatctgtgatgaccatattttccacttctacatattgctgatttatctcaatctgccattgaatcgtttgatcctgataactttttgatggtgctgtttttgtcacaccaattttgcttgttggggtcactgttcccgacccattatgagaagttgtcgtatcatctttgatagttatatagttagtaattctagtattcgccagtactggatcaaagagttgtgtctcataacgaatcacatattgtccagcatgagcgaacacaagttgaaattgaacaagctgattatctttttttatttctcctgcttcatcaaagtgccaatctgtcacaatactgttatcatttttgtttctgaccactacagaatcggctactaaataatgcaatgcattttctgaaagtgatccagaatacgttttatcagtgagaattgaaccgtctttgctaagatctaaagaaacctcccaagaagcacgaccagttgactgatcataacctaaaaatcgcttatattccgcagattcatcatagctgactgttgcttcaactgatttttcatggaaattatctccagtgatttgagcaacatttttgaaggagttaatcgttggatcattgacaacactataaatttcaattttgactggcttatcgattttttgattgaatgtaaaagttccagtcgttgagttataagtatacaagtcgctagttctaacccaagcgtctccatcataaaggtaaccataagaatgagaatatgccaatccgcttggtagtttatctgtcacaacgacgttttctagttccttgctttccgtattatatacgatctcccaaacaattgagccactagtacttactttcccactcttcgtaatatcgatttgatagattggtaaagtaatcaggatctcattgccatcacggtcataaataccagtttcgatgacaacatcttctgtgattgttgacactttcaattcggtttcaagattgattgtcccacttctacctgatagattctctgcgttttcattgaaaacaatctttaattctccatttgcatttagataaaagtctcctaatgatcctccacctgaacgctgtaatgtgcctgacacctcattgtgaacagcaaaatagcttggtagctgataaatataataatcaccgtttttgatttcctcctgatcagataatgaccagtcaaagtgaatcttaatattgtcgttataataaggaggattgttttgatcaaaaggttgatcattcatatctgtaattcgtacattatcaaatagttgaattcctcgagcatttaaatctggattaacagcatttggagtgactgcttgttcggtagattcagtctctgaatcctccgtgggtgctcttggctgtattgtattttgattcaactctgaagtggacgtttcagtcgtagtagtagtggtcgctttttccggttgactgtttgaggtatcttcgactgtttgactagtactctccgcgttttctgaagttgttgttgattcttccgtttttgtgtctgtcgcaggtgaattcgattgactcgtttgactttcaacttctatatttgaaaccatttcagctactgcaattgccggtgtacaaaaagtcgcacctagcaaaaccaacaagctcaaatatgcacatagttttttattcatagtgattcatcctttctaaaaaaacaactgttactttttagaaaaacttaatttttttacttttctaaaatataagtttttctaaaagaaccaaccaatataattatttatgatggcaccgtactgtacgttcttccctcattcttccgaagacagcataacgattgatatagctagaccagaacctatttttcattcaataacataccttttttatagaaaatcagagacaagtatcaataaaaaagcatgtgttatctcacctttattttcccaaatttggcataaactaagtgttcaaaaaaaatcatttttcaaatatttttgactatttggaaaaacgtgctaccatcaatacataactgattggaggaaagctatgttcagaggtttattgtcaactgcttcacaaataaaattgtagttgattgaaagtttgttgcatgaccgtcactgttttattgctgatttgctggatgaatttgacctgtctttgtcgttgttcagaaagtatgtgacagagatcaatcacgatctgtcctttcttcaaataaatatagacaatcattcctaagtgagtctggaattccattctttcgcttcacgatcggatgtctatagttttttcttggctgactcttctgctttcaaactcttggaacttctgttttcatcccacttttccagttatgagacactagcgattgaattgaatctaagcaaatcctcaattattcgtttaattaaaaaaatcaacacggtcatacgtccttttgattttcatatagaaaaaaaacctatccgcatagccgggaatgaaatgactattcgccagttttacatggttttctttttggagaaataccaacatgagtttagagatgccagtaaaaatcaggaacaagaatttttaaaagttgcacaacttttggctgaagttactccattaaagctgtatttttctgacatacgaaaaatagcgtttatcatttatgtacatagtaaacgagagaggctttttgccacggaagtgcaatcgaataaaattgaatattttctagaaaaaatcgatctcgctgaattctctcgctacaaacgatcttatttagaaaaagttatgggttatctgacttctcatatcacagccgacccagctatctataaacaagtaaaaaaaatcttctatcgattgactaaacaaatttttcttaaataccattacaccgaaacagactttcaagaaaaattggatgctgttagtttcaaatatttgctggaaacgaatttgaatgttccgtattgtattttgaatgatcgcctggcccattttgttgataactgcgatcctgtccagcaagcaatcaacaaggatattgttcagctagtgactcattctgaattaccggcgattcgccctgctacgatcaaccatttgatttatattttccatacttcttttccactatttacaaaacaaatcattgatcaacatgcagattatcatctcgccttgttctacgataccaatagcgaccatacggaaatgatccgaacacaaatcaaacagttcgtcccctacgacctgaaaatcacgattctcaatccgttagactctttttcaatccctgccgtcaaagcaacctatgatttgattatcggaaatatcgtccctccttttcagaaagttcctttcaaagcaacagacatctttattacacgaaatgagattggctatatcgcaaacagtattcaagaaaaagcgatccagcagattgagaaacaaaaagaacctcttagccctactcactgaaaaagtgagtttcgctaaagaggttctttttaattttgtcgttcgagtaattgtttgccttgagcactctgataaaacgtttcaattaaatgatttaaatttgtttttgtctcactggcgccaaaaagttcaccgccaggttctagcataagaccattggctagacgaccgatcactaccggatcaaagccaaagtcgtcaacgattttggccgtttgagacatagattccggatcattaccagcgattgccatggcttttctgtctggtgaaccagccggccgagcttcgtcttgaacatcatgataacccatatggttgaatgccttgataactctgctttggtcaaaatatttttggaccctttctgaagatgtttcttcaacagtcgaatacgttttgctggttccatcaacttcccaccaatagttcattgcatcgatcacaagtttaccagccagctgctccttgggaagtgacggatagttgcttaaagggatcgctaataaaatgactggcatttccgtcaggatgtctgagacattcttcacctttgcacctggagcaaggatttcaacagctagagcattcttttccgctggctttctgctagcgatccagacctcatacccagcttctgctcctaattttgctaatgctaaccccaacttgccggctcctaagatgccaattctagattttcccattatttcccacctgatttcaagagttctttgaccctagggattacttttgtaccataaagttcgatagtccgcagacggtctttttgtaattgtccaccggttccataaacaagatcaaaccgttcgacgccgacttgcggcatcgttcgcgcaattttttgtgccacagtctcaggactacctacatagtaagagccatgttctacttcaaaatcgaaacgttctttcgacatctcgggccaaccacggtcttctccgattttatccatacttttcttgatatagtgccaaccgatttcgtacgcttcctcatccgtctccgcaatcaccccatgggaatgcatccctaccggaagaatcggtctgcccatttgctgcgttgctttttgataaagttgtacatagggggcaaatcgcgcaggctccccgccaatgatggctagcataactggaaagccgtagcgaacagcacgaataatcgactccggtgttcctcccacgccaatatacgtatccagtgttccttcgagttttggataaacttcggcattctccaaagattgagtaaatttgcctttccaggtcagtggctcacctttaaggagttcgtaaaacattgctactttttcttcaaataattcttcataatcttgcagatcatagccaaacagtggaaaagattcagtgaatgaccctcttcctaacatgatctgcgcacgaccatttgaaagggcatcaactgtcgcaaatcgttcatagacccgaactggatcatcagaacttaatacagttactcccgttcctaatttgattcttttagtgaccattgccagcgcagctaatactgtatctgggcttgagattgcatactcttcgcgatggtgttcgcctaatgcgaggatatcgacaccgacttcatcggccaactttccttctgcaataatatttcttaatgattggctgtaactgattcgttgatgggtctggtcatcaaaggcaagatcgccaaaggtatctaacccaaattctatttgtttattattgattgtcatatcatttccctcttttcaaatacttcctgcattcactataacaacttctttttattaacgcgaaagatatgcttactttttgtaagtcaactgtttatgaattgcttcaaaaagaaaagcgcgtccttgcttcaaacaaggacgcgcacttttttgtttttttattagccatcagagatagattcctttgcttcttaaattagctaaacacttctctaaatacattgcagtatgttcaggataaatagggactgattgctcaatcggctctaacacctgataaggagctgtcttttgcccccgataagtaggctctaaccacgctgctgctggacgatagccgcgacgctgcatctctgccatgacaaggagatggtattggtacagcttatatggagaatgagcaaaaacgtaatcgactgtcgcatgtttctttccccagccagcgcctctcagcgcagctacttcccgatgctgtcccagtaattgttgtcttggtaatttaggcaaaagtgcttcatgccacaatctcatatcctcagttcctctgcttcgcttgatttatgtctgtaatttattggttgtcgagcacgattttccctaccgcatggtgtgtttcacttaatgcatgggcatcatagacaccttgacgagtcaatgggaaagtttcgccaatcacacttactaatttgccatcagccattagtttagctaattcgcttaactgttctccatttgtacgtaaccaaattgcttttgcttcaatttgtttcgttgcggctaatgtttcatcttcaatactcagtacagaaatcaagcggccatgctcttttagaacggagaagcttttcttttggatctcgccacccattgtatcaaaaactaaatcaatgtcagtaagaacttcttcgaaatccgttgtatggtagtcgatcacttcatctgcacctaattttttaacaagttcatgattacggggacttgccgtcgtgatgacataggcgccggcatttttcgcaagttgaatggcgtaggtcccaactccgccagctccggcatgaatcaacactttttcgccagcttttaacgaaccatgatcaaatagagcttgtaatgcagtcaatcctgctagaggcacagctgcagcttccgtgaaggcaatagattctggcacaggcgccagtaagttgctgtccacaatcgtataatccgcataggtcccaaatcgtgtcgtctctggacgagcgaaaatccgatcgcctacgtgatagtctttaaccttctgaccaacttcaacgatttctccagcaacatcccatcctagaataatcggaaatgaccaaggaaacatttgcttcaagtatccttcgcgtaatttccagtcaattgggttgatcgaagttgctgcaactttcaccaacacttgatccgcaccgagttcaggtagtgaaactttcgcttctgctagtttttctttaccaccatattcattaataacaactgctcgtgtttccatgtaaatcactccttgagattatgtaaataagcttccgtcatttttctaaagaaacgaaaggtctctttcatagcttaggcaatgatccctgattttacaactgattcgactttcccttttctatcagaaaaagcagttttttcactgactaactttttattgcctttttaaaaggtttcatttattctacaggaataagaatgtgataagaaagaaggaattgatgaattgaaaagattgcacgtattttttggcgggatcattgcgatcctaggtattctttttgttggcaaagctgtactgtccaatgaaacaggaagtgcatcagcaaatgatgctaacacggttattatttataattggggagaatatattgaccccgatctgataaaaaaattcgaaactgaaagtggctattcagtgatttataatacatttgattcgaatgaagcaatggaaacaaaggtcaaacaaggcggtaccaggtacgatttgattttccccagtgaatcgatgattcctaaaatgattgaggagcagctgctgattcctttagaacatgataaactcgtcggcagtgaagatctttctgattttctgatggatcagcgctttgacaaaaacaatcattactccattccttatttttggggaactattggaatcatggttaatagtgaccaaatcgatcctaccaccattcatggctgggcagatttatggcgcccggaatttgccaacgatattctagttgttgatggcgcaagagaaacgttaggaatggctttgcagactttagatctttctcaaaatgagctagatacagcaaaccttcaacaagccatcgagaaattggaagcattacgccccaatgtcaaagcagtcctcactgatgagatcaagactttgatggtcaacaacgatgcaccgatcggcattggctattcaggagatgcagcgtatgtcatgtctgagaatcctgctataacctatgtcgtccctaatgatggcggtgctatctggacagataactttgcgattccaaaaacagtcggcaatcttgaaggagcttatgcgtttatcaatttcatgctgcgtcctgaaaatgccgctcaaaacgctgagtatgtcggttatgcgacaccgagtgagaccgcgaagcaactgctaccgactgaattgacctccaataaagctttctatccagagccggaagcaatgcaacagatggaacactacgaatacctaggaaaaaatgccgttgaacagtacaacgatctttttctcgaatggaagttgggattataaaatgaatatactattgaagtcttcctacatttttgatacagaaagaaaaacgacctttgctggttttattttgattgaaggaactaggatcaaggatgtgggtcctttggatgccacacctaccaacttaccagctgaaacaacgatcattgattgtcatgaccaaatgatcattcctggctttatcgatgcccatattcacttttatctttccgctttgctccatgcagggcagttaactcatgtcactggaacaactgaagaagcagttgcccagcaagtaccgcaaattcctgtgacccatggctggaaaattgggattggttggttcagcagtgactttggacaacaagtctatcccacaaaagcaacgattgatcactactgtgacgaagtgccagtcatgctgatttcaggagacgcccacagcatttggttaaacagtaaaggaatggaaaccttagaaatcacaaccgattcagttcctaccggaatcagtggagaagcattgatgaaagatggcgaattgacgggttgttttcttgaggcagttgctattaattacttggcggaggtgctgcaatcttttcaagccaacagttactcaacgtacctttcttacatgaagcagctcaatcgttatggcattactacaatcggcgatgttgccctgactggcgaaagctgggacgacttgatttatccagagctttaccaaaaagttgccgaaaaagcgactttacgggcggttttttaccctgcgatgcgaatggaaatagagcatttaactgatatctatcaaaactatcgatctgagaaagtccaaatgggtggtgtgaaacagttctttgatggtgtaacaagtacccatactgctttgttgaaatcggagtacgaaacgccttattttactggtgatattggtatgccgctgattgcaattgaaaaaatgcgccagttgattttcttagcaaaccagcaaaattggccgatgcgcatccatacgatcggtgaccaagcgatccatcaagcgttgtctttttttaatgaaagtcatgcgcgcttccctctctctgccggtaaaaataatacactggagcatttggaagtcatggatcctgcagatctttctttagtggcacaagacaatttagttctttctgttcaacctagtcatttattagtcggctatgaaacgttagatgaagaagtaggtccgcaacgcgctagtcaaatgtttccttttcaatcctttttggcccacgatgctgtagtagcatttggaaccgacagcccagtagtgatcgatgtgtctccattggattcgatctattatgcagtggctagaaaagaaaaaaacggctctccagtagaaggattgatgccctctgaagtgatgaatgtggcagatgctctggttgctcataccgctgatgcagctcgggcactcagtcgacaagacattggttcgatcaaagtcgggcagttggctgatctttgtattctttcgaaaaatattctttccctttcagaaaaagagctgcttgaggtagaagtcactgcaaccatttttaacggtgcatttgtctatcaaaaagacgaagcttcgcagcaaaattcctaattggatctttgaccatatccctcgaatacccgaataatggctgacttgcttctctcgtccgagggctctcattcatggaagacccttgactgtgttcacgttcacgctaatcaaccgtattattcgggattttttgtcaacaccaccctaatcccccatccttttttcgttctggatactgccaggctataatttggttcctcttgattgttccctctgatcatttctcgctttgtttcgtcttgattcctgctcaatcattgccctcttgatttccctccaattccttaaaatatatacaatatgaccaacaggatcccaccaacgatttcacttattggatacttgcgattaatcggtaccaaacaattcctgcacttgccttttaagaataaaaatgaccaaatagggatcagctgccacggggttagtacctttccacagtgctcacaatgagagcggcctcccaatgattcctgacggggcaaacgataaacaacaaccatcaaaaaagaactaagacagctaccaagactaaatactgataaaatgggtaatagcaacgctcttcccaaaccacacactcctctcgtctaatcgacacctcaaataaagagcctattcataagcaaatacgctcttttaaacacgaatttttttttattcttcagcgacgtactgctgacagcggatacctagcagtacgtgatcgtctgatttatgtcatcaaattgattggatgtgactctagcctcttgctcttatttgctactgctgacacctcctttgttgcgaaacaaactgagtgttactgaccatttcttaaagaaaattcattgatgattcgaggattgatttcccacaatagtcgattccaatcctctgcgtctggaattgacttaaaaagcaaatgccagtttccaatcaattgatcactgacatattcactataatttgtcactactagatcaatatgattctgctctaaataatctaagttcatctctaatacattcgggaaaaacaggtgctggaaccggccaagatatttgatagccattgcttggatattctgacaaacaaggtagtttccctctaataaaaatgcaatatttttaggtgctccccaatggatttcctttagtgagtccatgaataggacggccatcacggtgatttctgttactgctgtctttccccctgagattgtctgatggtgttcggtaaagaatgctaataactcaagatacaaatctgggtatttctcttggacgacttcatgaatatcaagaatattttgatttgtgactggtgatagctgttcttttaaatacagcatagtaaaaaaagaacgcacaaggatcatgtctctctgaaggtcattactctgctggccaaaagcggataaaaatagttgggcacagtctgtaatcccaacattcggctggagttcctgaataaactgctgctctccagccagatccgtcaatgaacgccgacacaaaatcatcacatacaaatacaataattcctccactggcaaacgtttcccgattgacgcatcaatcacatcattgatagttgaaaaacgctggaatgcctctcgttctttcagcgcttgaatcatttctgactcgataagcaagtctccctcacgttctaaagtaatcattagagtataactaaaatctcccaaagaaacattgggatagctactgaagaagtgctttttttgtaaggcaaaggcaatcgactggatggcaattgatggcaagaccgtgtgtggagttatttctgattcataataaaaatcatgaaagaaactgcgaatatcgatttcttttccaatgaaatccactttcttcagggacagtgtcagtcgatagcgcgccaattcattttctaccattttgaaatagcgcagcaaactactttctgagaagtggagttgatcggcccattctccgatctctttgatctgcctttgaaaaatcccttcaataatgtgaaagagtggttcattttcaagcaatgaccgctttttagtttggtacgcttctcgattggtttctttgaacaaatagcctgaactcgtgttttcaatcagaatcgactgctgaaaatattgccgaattccggtaatatcggcaatgatcgttcgtgaagtgctttttgtgaattgggctagttctttgactgatcgcgttggtattcgctcgaaggtatgcaagattttcagccatcttacagtttccttattggtaataaaattaagttgaaaatttttcatctcttttctccttactggttttcattgccgttattgactgaatcgttttccttattatacgccctgcggaggaattatactcagttgcaagcttctggcagcaccagttatcgtgatttatacgagataaaggaacccagttatgaaaaaaacggtcatcttgacaaaaacaggtatcgaattgtataaaattgttattttttgttaaagccctcttgattgtaagcggtatttttgttattctttaaaggtagaggaggtggatagtgcagtgtatgctatcaagatatttcatggttatctgacagcacaaggaaaaagaactcgagataaatcaattgctttgacttatacatgcaaagaagatgccgaacgcttcgcaaataaaattggcgggagagttaaaaaaattggataacctaaactattgaaaaagagtcgtcgaccattgattgttgaccactctttttgttttgttaaaaaatattctctaacaaatccttttttctatttgtttttatttctcgcttgtcaaaaataaaaatacactgctgcgatcaattgttgaatggccatttcttccccttttcacttctattagccaaaaaaaaatgactgaaacgtctgagttgaaacaaagtgttttctcgctcagaaacggttcagtcattttctttttatggaatcgcgatagtcacatcgactgtctggatcgccacgtcataaaacggatcttctcgtcttcccaagaaatcttttgcttgagctgggaaaagtgcatacatcagtacatcttcttccgttttggcatattctttgatttcttgctcgaattccgggagctgcggtggaatcaaatctgctggtcgttcggtgatcactgcttccgtcccaatgattttttcttggatcttcgttttgattggtgccggaggacgaccgtaaagaccacgaacgtaatctttgatctcagttgggactagtttgtagcgttccccagaaatcacattcatcaaagcctgtgtgccaaccatttgagacaaaggggtaactaaaggaggaaatccaaggtcggcacgcactttcggcacttctgccaatacttcttcgtacttgtcctgcagaccttgttctgtcaactgactcaataagttggataacatcccaccaggcacttgatagatcagtgtttttggttctgtatctttgactttaggattcaagatcccttcctctcggaaccgatcgcggattggattgaaataatcagcaacttcagccaatttctttttgtccaggtttatatcaaatcccagttcttctaatgcgatcgccacagattctgtcgctggctgactcgttccccctgcaaatgaagaaattgctgtatcgataatatctgccccagcttctgcaactttcaaataagtcatttctgaaataccactagtagcatgggtgtggacctctaatggcagatccacagcatctttgattcggctgaccaattcaaatccgatttgaggtgtcagcacaccagccatatctttgatacaaatcgaatctgctccaatatgggccatttcttttgctaattgcacaaagtattcaacggtatgaacttcgcttgttgtataagagatcgctgtttggcaatgaccaccagcttcttttgctgttgtgatagaagtcgccaaatttctggtatcgttcaatgcatcaaatacgcgaataatatcgattccgttcttgatcgatgtctctacaaattttcgcaccacatcatccgcataatttttgtatcctagtagattctgtccgcgaagaagcatctgtaatttcgtgttcttcacttcacggcgaatctgtcgaagacgttcccaaggatcttcatttaagaagcggatacaagaatcaaaggttgctccaccccacatttctaatgaatggtagcctacttcatccaatgttttgatgatgggcaacatatctgacgtcggcattctggtagcgatcaagctttgttggccatcacgtaagactgtttccatgaattgaattttcttagtcatctgcttgcatccttccttttgaaactaattcatttattttttgctgtattgcttcgactgaatgcgttctcgatcgtccgcatagttttgcttccttgtcacaaagaaagcagcgccgtcttggatagcctaacgcttcgcgactgatggactgcacttcacccgcttctagccaaagcacgtcaagatctgctaatcgcccataaggatgtctttcttcaagtgccaccatccttttctttagttcttctttttttaaaggaagtaaaagaaaatattcatagccagttttttcatttcgataaagatgaaggaatgaaaaggcatccgccactgctcgctcgacttcatccgtcaagcttttaaacacagcttctaactcatctgatgttttgacaggtccgggaatattcatggtggcagatagcagtgtgtattggggcgccgactccagtaactccttttgccgttttgcacgctgttctctagccgccaatacttctgctaatgaaacttccggtccctcaaataacaagctacacatttctcacaacatcaatgagcgtgccgtctcgatattcaatcaatgccactactttatcgccataatgaatggcttcaggcgttccaacaatctggtaagctttctcttttaactcttcgatcgtatactgaggcacatctagtgttttaaaatgttcaatcaaatcttgacgatctggattgatggcaatccctacttctgtcacgatcacatctatacttgttcctggagtgaccactgtatttactttgtcaacgatcgttggaattctgcctcgcactaagggtgaaataacgagactcattttgcatgccatactcgtatcagagtgcccgcctgacgctccccgaatcacaccatcggatcctgtcatcacgttcacattgtagtctgtatcgatttccaatgcggacaaaatagcggtatctaattggttgatcactgatcctttacttaacggcgaagcatacatctcagcatcgatttcatagtgtcctgcattgcttcctaatgaaacggctgaagaatgatcgaaatcttgtacatcaatgattttttcaaccaatccttcctccaatagttccaccattgcattggtaataccgcctaatgcaaagctcgcttttattccatctttaagcatcgcttcgcgcaaaaagcgggaaacagctaatgcagcaccaccggtacctgtttgaaaggagaatccctctttatagtaaggagaatttgtgatcacttttgctgcgtattctgcgatcaatagttctttcggatttttggtaaagcgggtggctcctttggcaatcccttgtgggtcaccgattgcttccacttcaaccacataatccacgtcggtttgcggaatactgattggtgtattcggaaatggcacgagcgtatctgtgatgatcacgactttgtctgcatattttgcatcgatcattgcgtaacctaatgaaccacaggttgcttttcccaccgtaccattggcattgccataggcatctgcacttggtgcgcctaaaaaagccacatcgatatgcacatctccagctgcaatggcccgagcccgaccgccatgtgaacggatcacaacaggattttccatgattcctgctgaaatagcagcacccacattgtctctcaatccgctggaagtaatattggttacaacgccatttttgatatggtcaatcaacggtgcatggacatttgcgatggagctaggggcaatagaaatatttttgatacccagaccagcaatttcttccaagaccatattcatgacataatcgccttcacgaaaatgatggtggaaggaaatcgtcatgccatctttcagccctgtcttttcgatcgcctcgcgaatactgctaagaagtttggtatctcttggacgaacgggggtaacggtacgacttgcttcttgatacgtatcgatatgcgccaattccccttcaaaaacaccgtattggtcagcatatacttgtggaatatcttttcctactttattcatgaccatgcctaaatatcctcctccgtaatcaacttcgctgccttagccaatgcaatcactcgctgtgcacgttcaacgattggcttgtctaccattttcccattgactgaaataactccagagcctttcgcttcggcctcgcgaattccccagataacttctttggcattctggatttctttgtctgtcggtgtataaatagcatttaccaacggaatttgtcgtggattgatcactgactttccatcaaatcctagctgcttgatttgttgcacttcattttggaatccttctacattgtccacatcggaatagacagtatcgatagccgcaattcctgcagctctggctgcatgcagaatcatgttgcgggcaaaggataattcctgtccatccggatagcgcttggttttcatatttgtgacgtaatcttctgctcctaaagcaattccgatcagtcgctctgacgctttggcaatctcccgtgcgttcaataccccttctgcagattcgatggctgccatcattttcgttgtgcccactggaatctgattgtctttttcaacagatgtaatgaccgcatccacatctaaaatatcttgtgccgtctctgtttttggtaagcgaataacctcaacgccagccaaaaccattgcttcgacatcttgggcgccacctgcctccaaactattaatccgtacgactgtttctacattgctgtaatcaaatgttttcaatgcaaagtgaaccaatgtacgcgcggagtctttttctttaagagaaactgcatcttctaaatcaaacataattgagtctgcaccatataagggtgcgtcccttagcattgctgcatttgcacctggaacaaacatcatggttcttcttaagcgttccatgaatcaatctccttccaatcatatgcgtctttttttgctgcccgatgaatcgcggtaatggttcgagcttgaatcgtacaatccaaagcgcctttatcaacggcagctactcgaacagacttgatccctaaatttttgatggtctcttcgatcacctttttgatttgttgaccaaattgtttctctacactgctttccaaagaaatttggatttcgtctgcttcagtcggctcgacagtaatcaaaatgtcgcttgactctactgtaccggctactgcgatttgtgtaatttccatatggtttcacctctcgttttttaaataatgatatgtcgttgatggcaaaaattgtctcaaacggcggtcatcctgatttttcaaggcttctctaactttggtagcactgatgatctcaccatcaatactcaatctaggtaaaataaccaattctaatgagtcgccaaacatttcctgcatcgcatgattatacgtatcggtcacctttgaatagggttcttctccgacaaaccgtgtccgaatgtctaatacaggtgctatcttctctttaaacagttgcgcatcaacctttgcctggatattcgctactgtttctatggcactgtctttcagaaagtaggaaggaaacgttgcggaagatacaaggtaatcattggtgggaaaaactgttacattggacaagtgtgcgactccacgttttaccatttccatccgatctgcagtcgaaaactttgaacgatcttcggataacacaaagacataaacttgctgactctgctgcgcagctgtctcgacaagatactgatgtcctttggtaaagggattggcattcatcactatcccgcttccgatccccatttttttccctttagccagcgtagaaagatagctcgcaaaatttggcaatcctcgttccataaaaagaatttctgaggttgcgatgattttctgaaaccctagtgagcgaaagatcaattcattgctgggttttgaatacaataaataatgttgttccccttcttctgccaagcgatcaaccagatgttgaatgatgtccgtcagtagattttctgattgaaaggctttgcaaacaaccaagcatttcaatatgttgtgataataggatccagtagcaaccagtaaatcgttatcgtagattcccactgtgtaatcaagttcttcctctttattcagaccggctcgatccatcaaggaagcccactgtttatagactccttgatctcttagccatagccgttttaatgaatacataaacgtctcttctttatctttttatttttttattggaaaaagtttgctaagcagcatcgaagcaagatagataatcaagataaccacgaagacgccgccccatcccagcactaataattccagtgatttcattaaatctgctgacatcgaatctctcctttcttaggttagtaaggcaagcaataaaccacctgcaataactgaagcaatctgaccagaaacattggcaccggctgcatgcatcaaaataaagttttgtgggtcttcatccgttgccattttttggatcactcgacttgacataggaaatgcagaaatccccgcggctccaatcattggattgattttttcttttctgaacaggttcagcacttttgcaaacaagacaccacctacagagtccatgatgaaggcaaccaggcctaaagcgatcaccatcaatgtatcgacttgcaaaaattcttcatactgcatttttactgagatagagagccccaacaaaatactaatgatatttaccagctcattttgagctgtgatagaaagtcggtctaatacgccgcattctctcaagagatttccgaacatcaagaaaccaactaatggcagagatacaggggcaatgagcccggcaacgacagagataacgatcggaaaaagaatttttgctgtttgcgagacttcgccagcgcgataattcatatgaatcgaacgctcttttttcgttgtgaccgccttgatcgcaaccggctgaatgatcggcaccaaagccatataagaataagctgcaaccatgattgctcccatatatttggaattcaaagtgttggctacaaagatggatgttggaccatcggcggctccaatgattccaatggaagctgcatcatttaaatcaaatccaaataaaacagcgacgataatcgtaaagaaaataccaaattgggctgcagccccaaataaaagcagaaaaggattttggagcagcggaccgaagtcgatcatggcaccaattccgataaacaaaagcaatggaaataactcggttgagatccccatatcaaacaatacttgaaaaggaccaggttccccgccagcactcaaaacaccagagttcgggaaatttactaaaatcgttcctagtcccatcggaactagtagtgttggttcatattcttttttgattcctaaatacatcaggatgccaccgactaccatcatgacaatccgtccgggttcttgtcccatccctaaaaagccttcaatcagagtttccactaacgtcacttcctctattcattaaattttttattgattcatccctattaatgaatcgtaatcaatgggtcaccaggattgaccatctctccttgattgacatgaataccagctaccgttcccgcttttccggcaacaatctcattttccattttcatggcttctaatatcatcaatggttgattttccgccacagtatctccaacattcactaagattctcaaaatcgttcccggcattggagaaggcatggcatctgcgcctgcggcaatgggtgcctcagaaacagatggtgcctcggatgcggctggtgttgcggtttgcggagctggtgtttcaactacaggttgaacgggtagtacaggttgtggtgtaccaccgatttcttccatctctactagatattctttgccatcaatcgaaattttaaatttacgtaacattgtttttcctccaaaatgctaatttttgttgattcttcgaataacaaactgactcttttcatttaatccagcagctagacttgacgcgatgatggaaacaagtttcgcctccggattgcgctgcattactttcttgaccacaaattggctcttaggttgatcacctgccgcaatggctgtcgcgatcaaactaacaagttgatattcttcttcactagcttcgatatatgcaggaaccgctttccatttcatttcagattcattatcatcgagcgtttcagaagatgtttttgttatttcttgatgtggttcactttttttgaacagtcgggcgaataatcccatgaagttactcctttcatttttttcgttctcaaccacattatattgataatggaccaatccggtagttctaaatcaaagattattgttttttttctgttcctatttcttcgccttacaacaaaaaggcttataaacattgttaaatcaacgtttatcaaccgttaagattttattaatatcttgttaagcctcttttaagaacacctataccaaattgtttttttcctgttctttttcagaattcaatctatcttatcaaatgaatattgcttattctatagtcgtcaaacggaaaagctaattgtttccaatacgtgtctttctcccccaaaaggcatgaagctttgttttttattggaatgaattggcaccgtttacaaaaacagaaattattaaatcagttgtagaaaggaagaaaaatatgttattgacggttttatcttatgccatgattattgtctttatgtttgtaatcatgaaaaagaaaatgtctccattcacttctttggtggtcattcctttgattttcaccttagttgcaatggtgtcaggagtatccaaagaaggaaacatcggggattttgttctagaaggaatcaaaacaacttctaatacggggattatgttgctgtttgcgatactatacttctcgatcatgctggacgctggattatttgatccgattacaaaaaaaatgatctatttcgcaaaaggcgatccgatgaaagttttgatggcaactgctgtcgttgcggccaccgtttctttaaatggggatggaacgactactaccctgatctgctgttcagcctttattccgatttataaaaaattaaacatgaaaatgatgaaccttggggtactggtgatcttgcaaaataccattatgaacttgctcccttggggaggacctactgctcgagctatggccgttttagaagttgatgccgatatccttacttatctggcaccaggaatgatcatctcagttctttatgtcatcttctttgttgctcgcagaatggggaaacaggaacgggcacgcttaggaatcactgaattgactgcagatgaaatcgaagaaatgacaacggtaacagaccctgaaacactacagattcgccggccaaaaaactttcttttcaatggtatcttgacgattggattgattgcatggctcgtagctagctcattcattgattcgattgcactaccaccacttttgttgttcttagttggaacgtgtattgctttaatggtcaactaccctgttttaaaagaccaatcttcacgaattggagccaatggcggagatgctgttcaagtcgttatcttagtctttgcagcgggcgtatttatgggattgttccaaggttcaggtatggcagaagcattggctaacagctttactcacattattccgaaagaattagccggcttctgggggctagttatcgcccttatttctgcgccaggtaccttcttcatctcaaatgatggtttctattttggtgtgctacctgtattagcagaagcagggcgtgcttatggctttaccaatatgcagatggctcttgcttcattgatgggacaggcgttccacttattaagcccattggttgcctttatctacttgctgttacgtttgactggattggatatgggtcaatggcaaaaagaatcagcaaaatatgcattgggaatctttgtcatctttatcgttaccattgtgttattaggtcatatgccgctttacattccacaataatattcaggattgatagggacgggtcgtcattgcggtctcgtccctatttttattagtaatacatgaggaaatcaaagaaaatcttgaaaaaaatttactagcatgttttattttcagaggtatcatgagaaatgaggaaaataaatgagtaatatagttgaagccgttaaaaaaaatcttgatttaacacaaaacaaaacattaaacgttctgatttatgaagcgtttcgaaaaaccatcatccttggtgatattccagcaggtactcgaatcaacgagaaagtctttgctgaagaattgaacattagtcgaactcctattcgcctggctatgaagcaattagtgaatgaaaaacttgtcgaacatattcctaaagctggaatcgtcgtcaaaggtattcgtatcaaagatgcctacgaaatttatgatatccgtaaatcattagataccctagcaacgatcaaagccatgaatcaaatgactgaagcagatttccaagaactgcaaacattattagaacaaggggaacaatataatgaggccgatgaaatagagctggttttaaaaaatttctctgatttcaacgcatttatctatgaaaaaagtcaaatgcctcgcttaaaatcaattgtcctagaactacaagcctatctcgtttattttcgcgacatcgctatccgttcgacgaaacgaagagataaagcattggaagaacactggctgatttttcgcgggatgaaaacaaaaaatgtcgaacaaatcacgctgatcacgcatgaacaccttgatcgatccttgcagtttattttggcggaaatggagcgtagacaaattgactgagtccctttcgaaccagattaccgactatgccttcaaagcattgttctatgaagtcagtctcagtcctaaacctggacttgtggatcccttgacaaccggtgcgcaccaagacatgaacttattcacatttatcgatagcacgatcagcttacgtccttattttcaacagtacctacatgcagggctgacacacaaaggaacccctagggagttgtttgataagcttagaaaaatcggagtagctgcagaaaaagccatgctgcgtgcaacacatgccatcaatacgcataaaggagccaatttttcttttgcagtcattttaggggcgactggctggtacttgcaagaaaaggcattgcctttaataaaagaagatagtgagaggattttgacttacacgcagcaaatgacaaaccacctactcgcagaagatttcaaagacttagagataaagacccagctcacttatggcgaaaagctttatctggaatacggaataaccggaattcgaggagaagccgcagcaggctaccctagtttgtcgcataaactactcccctttctacggacaactgttgatttcccaatggaggaacgtttattgcggggactgattttcttgatgagtgaaatcgaagatgggaatttattgcatcgcggtggtttatccgcttggcaaacagtgaaagaagaaagcaaaaaaattcaccaagccaccttctcaaaagaagaattgcttgatgaattacaaagctatgataggattttgactcaacgccacttaagtcctggaggttctgcagatctattggcattaggtatttattttgctcaactagaagagatcctttaaacaccatcgggcaaaaaggtatagcctaatccccatactgtcttgatatagcgagcttgctttggatcatcttcaatcttatttcttaaatgattgataaaaaccatgaccgtatttgcgtctagctcactgccgttccatacgctttgatagatttgttctttcgaaaaaacttgatccgggttttctataaaaaattgcatcaattttgtttccttggatgagagcttgattggttcttcctttttgtagagttggtagcgagacttgtcaaagcagaaatctccaatcatgattttgctctcttttgaaagggcacgatgctctttgataacttgccctctatcaagggtcactgttacttgtgctcttaataagttaggcaaaaatggcttggtaatataataatctccacccatttccaatccagtaatgatgtcttcttcatttttcttgccactgagaaaaatgatcgggacaagtggatcttcttcacgtataatctgagcaagatagtacccatcgttttcatgttctaaactaatgtccaataaaaataaatcaaattttacccgtgtcatgatatcgactgtcttttcaaccgaatcactttgataaatcaagattccggtcgattggagtgatttccatatcaatcgtcgtattgctggatcatcatcaacgacaagaattttttcgtttctcactttttttcctcctagttctttggatcaaattattaaagggagcgttttttatgaaaaagccttcaagcagattgcttgttctaggaatgatgaccgtcctctttttgactgtattaggaatggtcatcacagcaaacagctatcagcagacacaaaaacatgcgttaaaaatgggggagaatcaactagccaaaatcaatgactctgtaatcaaaatattgcgattggaaatcaaatcttacactttagcactggaagattatgcttcgaatatttttaatgaaaaaaattaccatgaactgatcgaagacactcagttggacaacagtctcctattcaagacctcggctgccgccggattatatcttgtttcaccaacgggcactctcctttctggcaaagacatccatgctgaccaatttgttaaagaacctgtcaaagtcacggcttttgatcaagatcccctttatctcaaagctttaaagggttcggttcttcaaaacggcgaagcttactttgctgatgatacgtcttatgtcaatttatatcgaccggtctatgacaagcatcatgtgcttcaatctatcttggttctgccaatcaatcttgaagagctatatcagcaagagattgacacaacagaaaaccaaaatggctatacgatggtcaaaaatgaagaaatgaaagtgctcatgcacccttccaccgaacaaatcggattagacatcatcaatgggcgaaagctgaaatatcctgacctcgactacagcgatttggctcatttagaagatgtccaaaagaccaatgaaaaaggaacattaagctacaattcttactggtggacagaagaagaccccaaaaaagttttaaaaatctcagcctatgaatggattacggttggggatgcacgctggatcgttgccagttcatcggacttttatgaacgaaatggactcgcactgcaaaaaaatctgatcatacttggcttactgaccattctcttagcaatcatcattcttttagcagtcagttttagtcattacaatcgccaaaaccggacctatatcgaaaatctgcgtttagttgaacggcaaaattttttgaaggaaaagcatgcccttgaaaaatcaatgatgcaaaaatcgcaattggaaacagtaggtctgctaaccactaccattgttcatgacatgaataattttcttactccgatgatcggaaatctgcaactgttgattgaagaataccagtcaaacgaagcgctcgttgctgatctaaatgaagtctaccaagcagcgcaaaaaggccaaaacctgtctacgaatgtattgcgctttactaagactggaatcaaaacgaaagaatccctctcgatcgaagaagtggtatcaggagccattgacaccatgcgcgtactcgtaccaaagaaagtcacattgtcctatcaagcttcttttgtgggcactgcactcattgaagccagtgacttacaagttattttatacaatttgatcaccaatgcttatcaggctcagccagaaaacccgcacatccaagtcagacttagtgcagcagcagataagcagttgacagcattccaaaaccattcacttgcttattgcgacaaacattttgcgcaacttaccgtgacagataatggtccagggatcccgaaagaaatagaaagtaaaatgttcacgccttttttcacaacgaagacagagtccaatggaactggtctcggcttattcatcgtctcatcgattgctaagaaaaacgattggatcttacaagtaaaaagcaccgtctatggaacgacctttacactagggattccagtagatagcggcaacgttcagtaatcgcttgcattacttatctaagccttttgttcgttcattcactatacctttattataacgaaaaagaatgaaggtttgacgaaaagtacaataaaaaaccagctattgtttgtcgtcatcagccgaaactcattttagtttgtcacggaaattccctcttgtttttctgcaatgaaaaaattacaggatagctcatcgcgtgattattagcgccagcttctgttctgcttttatgtcattaaagcccttctcaagggctttttttgttgcagctgtttttaattgccgcgatgattttacaaaaatcaaaagttttaaggtgtgttcgctttacaaaagagaacgtatgtttgtattatacaactagggaggcgtttttgatggggagatttaattatgaagaagaaccgttacgggatattttgttcattgatgtaaaatctttctatgcatctgtcgaatgtgtccagagagggctagatcctttgaccgccttgctagtagtcatgtctcattcagataacacaggaaacggattagtcttggcagcttcgccaatggcgaaaactgttctggggatcaccaatgtcactcgtgctgacaacttgcccaaccacccggatctatataaagtttcacctcgcatgaatctatatatcaaagaaaatttgaaagtcaacaacgtttatcggaactatgtggcggatgaagatctcttactctattcaattgatgagtcgctgatggatgtgacgcaaacgttacatttattttttcctgatccttctctttctagaagcgagaagcggcacaaaatggcagaaaaaatcaaagcccatgtcttcaaagcgaccggactgcgggtaactgtcgggatcggtgataatcctcttcttgcaaaattggccctcgataccgaagcaaagaaaaatcccaccttcattgccgaatggacatatcaagatgtggaaagcaaagtatggggaatttcgcagatgactgatttttgggggattggttctcgaacccaaaaacgattgactcagttggggatcgaatcgatcaaagcattggctcatgctgatccagattttttgcgcagccgtatgggcatcattggggaacaattataccaccatgccaacgggatcgatcgaacgattttagcagaaccagccccaaagacaatggaaaaaagttatggcaataatcaagtcttaaatcgaaattattacttgcagagcgagatcgaattagttatcaaagaaatggcagaacaagtcgccgcccgaatccgccgtgaaggctgccaaacacaatgtatccatctctatattggaacagcttttggagagacacagaagggctttgcccaccaaatgaaaatccctgcgacagataacaccaaactattgattgctcacgcactgttcttatttcgcaaatactacacaggacaagtggttcgtcatgtggggatcacttattcgagactggtttttacccaaagcgttcagctcgatttgttccaagatccggaagaacaactaaaacagcgaaagcttgatttactgatcgataaaattcgcgccaaatatggatttacttcaatcgttcatgctgccagcaaattagaaggcggacgagcgattgcacgggcgaatctcgttggtggtcatgccggtggaatggatggtatctcaaacgaacctcaaggcaaagcagttcgtccaaaataggatggctgctaagcattttgctatacgcctatctcttttgctgataaattgaatctgtggaccagccggaattcacagcattgctaaaaaggaggaaacaccatgtgtgggagatatttatttgatccaaggacgggtgagctgtctgattattatcaagaactagtcacgatagctaaagaacaaaacaaaaaaatcgctgttgatgaagttttcccttccaaccaggtcgtcacgctgattgccgatgacacgcagcaaatcgtaccgatcctaacccattggggctttactggtttcaaaaaaggccaacttttaatcaatgcccgagcagaaaccgtagaagaaaaacgtactttcaagaagccatttctggaaaaacgctgtgcctttccaatgtctggcttttatgagtgggatagcgataagcacaagtttctctttgactcctcggagcccctctaccttgctggtttctatcggaaccattctactgccagcggttcggaagatgaatccattattttgacgaccaagcccaatgcaacgattgcaccaatccatgatcggatgcctgttttgttgtcgaaggcagatgttttgccttggatcacggatgtgactttcgcaagaaactatctactccaaacgatgcctgatattcacccacaacctgtttcgtaaaccaaaacgccgccagaagaatttgcttcttctgacggctttttttagcgagtgacggctttaataaacagtaaaggtccgtcctgtcatgataccaaaaactgatttttcataggcagcaaaaactttttcatccgcgacaggcagaaagccttggaatgagggagcataggtctcccaagagcctgccagcgcattcggactgaccgcattgatacgaatgccacgaccaatttctaacgccgctgaagcaacaaaagcaccgattgcgccattcaccaatgccgaagaagtacccatcggaataaactcgtcttgaatgatgcctgaggtcaacgtgatactgccgccctccgttaaataatgctgtccgatcaacactagattgacttggccttgcagcttgctgtcaatggagcgctgattttcttccggtgtcaactccgcaaaaggtttgaagacggtactacccgctgcggaaataatagcatctacagtaccgatctctgaaaacagcgtccgaatactttctggatcagcaatctccacccggtagtcccctgcacttcgactcgccctgataacctcaacagatttgtcttgtaaaccagccagcaaaattttccctaacgttccggtatgtcccactaaaagaactttcatccaatcatctcatttcgcttattttttctcattctacggcagattttttctttttacaaacgttagctgtccttttcctctttctcctctttctgtgcaggtaagtcttgatttaagaggattggataaagacagctattgtcaaattacgaaaaaagtttgaatgttttgtgaaacgccttccttgtaaaaggacttctatggtataactctaaaaaagaaggtgaagcttatgaaaaaagaagaactttgtacaagtaaatcctatttagcgaaagtaatcggacaacctaccttacaaaagatcaagatcgttcgcttactgagcaatacagcgactgtcgaacttttagaagggggcaactacggcgtagccaaactcagtgacatccagccattgaccgattagcggttagtaaagactgctctaaaaaagcgtcaagcaaacaaggaaattcctaggcttgacgcttcttctatcttattaaaaaagtgagtcttatccttgatgaatcagagttgctctgactgcatttggtacatttgctgatagattcccccagcttgtatcagactggcatgattgccccgttcaacgattctaccttgatctaaaactaggatttgctcagcttgcttaatcgttgataagcggtgagcgatcataaaagtggtccgtcctttttgcaagactgtcattgctttttgaatgattgactccgtttcggtatcaacgtgactcgttgcttcatctagaatcaagatttttggatcaaataccaaagcacgggcaaagctgatcaattgacgttcgccactggaaaactcattgcccttttctacgacgggatgatggatacctttcgggtaacgcgtcagcaggtaaccggcaccaactttttctaatgcggataggatcatctcttctgtgattgacggatcattcataccgatattgctggcaatcgttcctgtaaacagatagggatcttgcatcacgatcgccatcgaacgacgaacgctgtgacggtcgaatgcttcgatcacttgatcatcgatcgtgatagtccctgcttgagggtcataaaaacggaacagtaagttcaagatactggatttcccagatcctgtatgccctactaatgcgactgtttcacctgcagatacttgaaaatcaatctcgtgtaaaacagcttgctctgggtcatatccaaaggttacttgattgaaagaaacatttccttctttgatcgcaataactgcttcttgctgtttttcaattggctgatcagcaaactcgaagactcgtttgccagcagctagcgattgctgaacattggtgatcgtttggaccagaccttcgattgggtcatagagtcgattgatataatcaataaaggcataaagcaaacctgcggagatagcgagccgaccatccaagaagaatgccgataatgtcgtgatcagaatcaggatcgttgaattccgcaaaagattgcccaatccccaggcaatactcgaatccaataacagatactttcgacctgtctgaaaccatttctcgacggtttcattgaattctttctgcagttggccttctctctgaaaggcctgaataactgccattccttgaacaaattcatttaactgaccactgatttgagaaatatattcccgcatggcaatattataacgggaagcatacttcgtatagacatgttgccaaatacccagaatcggaatcagaataagcatagccaatcctagagtatgattcaggaaaaagagtgccaagaaagccccaatgatttgaatgatattgctcatcaaattactgatgacgatcacatagaaattggagcgcaaaacttccgtgtcattcgtgattcgcgcgactactttcccagcaggaatctgatcaaaataagaaacgggcaattggtgcatatggtcaaaaagctggtcccgcattttcttcacaatgcgatttgacattttacgcagctgcagcaagctgatataacgaaagagcgagccaatcaaattgatcagcaagtaacccgctaataattggatcaagaaaaggatattcaaattccctgtctcaaccgatggagtcatgacgccgtcaatcaatcgtttggcaatcagcggtgatgtcaattccagtgcagcacctagcagtagcaatactgcaccgatcgaaaattgttttttgtaatagcctacataagacagcaggcgcttaatcgttgagaacatcttgatcgtcctcctttaactgttgatgataatattgctcttggtaccatccaggaactgcgatcagctcctgatgggtccctctttggataacatgcccctcttccaaaacaatcacttgatcggcgtccgtgatggcggataagcggtgggtcacgatgatcgaagtcggtgcatctgtcattgctttaaggtttgcgatgatcgtttgctctgtttttgcatcgacagctgacaaagcatcatccagcaacagtacatcactccttcgcagaaaggcccgtgctagcgacaaacgttgcttttgaccccctgataaagaaactcccttttcaccgactaatgtttcaaggccttctggcatccgtttgatgtcttcagcgaaacatgcgagtgataacgcttgccataagcgttcttcggatgcgtctgggtccccgaacaataggttttcgcgaatcgttcgtgaaaacaacgtatgctcttgcggaacttccgcaaagtgacgacgaatctcttctgtctgaaaagcagtcaaaggctgcccattgatcattggcatttgatttgaatacgggtaccgatgtccgaactgacgtagcaaggaagtcttaccactacctgttttgccgacgatccccaacacttctcctttggtaatagtcagatcaacgtcttgtaagacaaatcgttccgtattcggatatttgaaactgtactcagagaattcaattgtttggatcatcggtacaagttgttgtcctgtagattctagctgatcgccagtctgcaatacttcattgatccgacgccaagaagcagccccttgctgcatcacatttaccagatctcctgctgaaatcatcggccaaaccaccatcgttagatagacttggaaagataccatcgcaccaatagtgatttgttgattggctactaggaaagccccgatcccgaaactcatcacaaaactaatcgccaaaataattgtaatcagcggcccaaaacgggaatcaatctcggaaacgatgtcgtttttttcacgagtttctgttgttttttgctgaaattgctgcgtcgttgctgcttctaagccgaatgcccgtaccactcggataccatcgatgatctccaacacttcactattcatctctgaaacagagttttgtgcttctgtaaaagctttatctacttgcgaaccccatttgaaaatgtagtacgccaagaggggcataggaatcagtgcaatgattgtcaatacccaagagactgtaatcgccatcatggcaacgatgaaactcaaatagagactcgtattcaagaaaaccatcaacccatagcctacggtcattcccatgacttgaacatcgtcactagaacgagtcattaagtctcccgttcgaaaccgatgataaaagggagcccccatgtttaagaaatgcttcatcaattgctgacgcaattgcttttgcaaatcgtatgatccgataaataaattaaatgtccaaataaattctgcaatatagcctaaaagtatcgcaccggcaaacaagctgacatagcgaatcaaaattgccatcgtaaagtcatcttgaatcagtgcatcaatgaataagcgcaaaatatagatcggtgctacatacatcgcactggcaataaccataaaaataaatacgattgcataacgcaatttatgcgctttaaaatacgtcgttaattgttgtaaaatatatttcattttcttccctctcaatctaaaaaagtacacaaaaaagctctgccctttcggaaaaaggacagagcataacgtcaaaaaatatcgacactatctgtgtactaacggattaccgaataagggattaactactattttgttgtttgcgaattttgctgtaacgttttgcatcgtaatccctccttctttttttatttgctgactacaagtaacactttacagataactatgagaatttgcaagaatttttattaattttttttaaaacgattgactttcttatagtccttttcatcacttaatgataaaaaaagaccctttattcttttcccattctgaaagaattcttcttgttcttttttctcttttgtcttgataatccttagtctgtcaagacaaaggacgccattatttggcacaaaaaaaagttttttataatccgcccacaaagaaatctgcttccaaaaaaagacttcctgcatgggaagtcttttcttaaaaaagtttcgtttttcaacactttgttctttactattttaataatcgacaaactattactcgtttgaacaggcttatgaaggtcattttcgtctcttttttgccgcgctttttttgaaataggatgtccgataccagttcagaagatgaagaaatggggaacatccttttaggtcttaaataaaatgttcatccttcaaaaattccaatacttgatttttcaatgtatccgtatcagaagcttcctgacgacggttaggtgagaccgcaggctgagcgatcgattcgacggtttcttgtagagattctggcggcaattccagcaattggaaactatctactacaacttcggcaccatagacagattgtccttccttggtttcaaaaggacacatatgcaaatgtccattgattttaacacttgcacctttctgggtataccgcaaaaaagtttctgcttgcttgccgttgataacacaagcaaaccattctgtttgcaactgttcgcttgtttgccactgtgcagcgactgctaaattaaaccgtacacacgtattatttgctgctgcagaagccagttgttctcgactgggcatctcattaattttcccagtaaggatcaccttgttcgttgccacgttactccctcactctacattttatttagactcgcactaatgcaagattagccatagtctatcacaaaaaaaatttcttgcaattcttttgagaacatctatagtgatcttctacagtttttgtcgctgacttttaaacaaaatttaaccgagcttagccttcatcagtcgttgaatctatttcagagacatacgtccacgtcatgccattgtcttctgaggtaaatacgcctttgactgttccacctttgtaatcccccatgggaccttgattgaccataactttcaactttccatcttctagataaggtgcttcagcaaccacgaaaaccttcttccattcatcaggcatttcaaaagcagcttccagccacgtgtttcctccgtctgtcgtcacatagagacttggttctgttggcgttactccgccgaaactcataaagccaacattctcgttgaggtagcacgcgtccgtcaagagtcggctgattcccttagccacttgcttttcctgccaagtcttgccaccatcttgggtcacatatgagagatagccttcctgccccattacgcggccacccgataagaaaatgtaaccaaaaccgtcttggccaaatgtcaatttgcgaaaacgtacagctgctgtctgctctgccagagcaacattcttccacgtatttccttgattttccgtataagtataatagacattttgagttggactgccctcactagcatattccgttcggataaatccagtccgttcaggagtcaaaatatagctgccagcgatcagcgcttgtttgtcgccactatactcgccgccaaaaaaatcatctaacggatagggcagaatgatttgatgtttccagctatcataagttaatttcaattgactcttaccaatttctgttttatacgcaatcgtctgattcgtttcctttgaggtggtcatttgattgttcttatcggtgatcgcacttagatctcccgcatctacattcgtgatcgctttgtccccttgagcagtcgtagcaaccttaacttgccaacaaatgtcccgcacagaaccgtcatcggaaactttcccccaataagatgtcatcgtctcacgattgatcgacttgggccacacagtaaattttaccgtcagcagcccatcttgataggttgcaccactcacactgtaagaatcgatccgtacatcttcttgcaccttcacagaagaaaaatagcgcatcaaatcataaaataaattaaatccttgtgtattcggatcatagttaaattcgctttcaaagggcagaaattgattaaaataagtaacgggctgttctttgatagcggattggtttacttgagaagtctctacagttgatgattttgaaccactcgaactgaccgctcgtcctacagaaaagccaatgatgaaccagatgactagcccaatcacaatcagtgtcaaaccgacagctaacgctacccgaattgctgctattttttatgctctttcacgggaaaaacccaccttttgttttcaattacttgaagtataatgaaaagtttcttttctcacaagatgctttttcacttcttaagaaattaagaaaagggttcctcattaaatagtttttagaaaaaataaaagcattcgcaaaaaagtgacatacttcaggctttccaaagatggaaaaactgaagtatgtcatttctaaccattctactgtttctttcatatttattcttatattgcttctctggtttcttcacacacgttgattaatggatcagattattccttcagataccttctaaacatctcctatcatctaataaatatgtgcgaacttgcgatacaaaatataatgaaccagtaataaaaagagtatctttcgatcccattttagcaacaatctccttaataccttgttgccactcttgataatatttaaattggctattttctcgaacaagatcttcttttttcaacgctttcgggtaatcgaatgtggttattataaggcaattattagggatttgctgcatctgtcggatcattttcctactatttttggttgttagcgctgaaaacaaaatatatttctttccttgttgaaatttttctgtaactgtatcaacaaattcttttatggcatgtggattgtgtgccccatcgataatgatcgtcggttgtgaactgattttctccatacgacctggccatcgcgctttttctaaagctttctgtatgctctctttttgtatcgctttgttttgctgctgacaataaagcaaaaaaagttgaagggcagttgctgcattttccacttggtattttccacataaaggaattctaagatttaaaaattgaaagtcttcattttcgaagtgaaacatttctccacttatagaatccttaggactatgactttcagggctttgcttcacatagtgaacttggtaagaggtatttttcttagagagtggcgcattttttttagaagcgacttcttcaattattttcactgcattttgcgaaatgtttcctgtaacaataggtatgttttttttgataatgccagctttttgcaaggcaatttcttcctcagtttcgcctaatatatctgtatgatctaatccaatcgtagtaatagcagttaaaattggtataaaaacattcgtactgtcccattttcccccgatacctgcctcgaaaattgcgatgtctgcgtgcttttgaaaataagaaaaggccattgcagtcaatatctcaaattctgttattccctgatagcgtgtatcctcatccatactatctaccagagggcgaaattcatttgctagctggacaaattcttctgcggagattgctttcccattaatcgaaatacgttcataaaaactttcaatgtacggcgaagtaaatgtacccactgctagcttctgcatttctaataaacaacgcaagtaagttaccgtcgaaccttttccatttgttcctgcaatgtgaatcccgatactattcttttcgggatgaccgcacagcttcagtagctcgttgactcgtatcaaaccaggccgcgatccaaattttttgcgcgaatgaatccagcgtactgcttcatctcctgttttaaacattcttatcatccccaatagaattgttagttcgtttagaaaatattacgagcgaagcgtttcaaaggaatcgcatgaccaaagaatacgatcatggctgtttgtacaggtagcatgatcaccgctttgacaatacgtattccccaaagtttcgtatcggtcaaaggaattgcatacatcattgacaaccaaattggtgtcagacacaaactgataattaatgtattgcaaagaacacatagaaaagaattttttattgtaatgggctttttataaaaaaagtagccataaagcaaacctgcaatgaatgaattcagtgtaaagccaatgaaaaaaggagctttccctaaaagagtattcccgataatatcagcaattgaagcaccaattgctgtccaccaagggccaaataaactagccataaccacttctggaacaaaatcaaaggtaattttcaacagctgggtttcaaaccctaatacttgagacaaaacgaccattaatccaatcagtaatcccattgttgcgataatatgtgcgtctatttttttcttcattcttagcatctcctttaatagagctgctacacaattaatttatgcagcgaatgcaaagatagaatcgtgaaatttgtttcttcgtctaaaaggcaacatcccatccttatagcacttaacgctctatcttctactctgtttttttatttttgtcaaaacagcaatcctgttgtttgcaagattctgtttctctgatgaactagattccacttgtataaatgtttcatcttttataaccagcatttcatttttttgcaacatttgtcgctgtgtcctatcgcccagaagcactattgaaagattctccaatgcataaatgacagcaatagtctgcggtttaataaaatgcatctcatttcctttaagcgcctgaacaaagacgtcgtaatcgtctttaaaaataacattaaaatcttgacactcaccctgacacgttgtttttaatttaccatcgaaatggtggggctcaaaagcatttaggctaatccaagaacctaattgccctaatctaactggattatccaaagacataaggattcgttgataaccagtaaagtcagaaaattccacggtattcataatcactgtcgcagttgagagacggaaatcaaaatctcgtttagctaagctacttgaatcaggttccactaaaagttctgtagtctggcctccagaccactttgtggacaagtaatcttcacatgttttcttctcgattgttcccacacttcttccttaaacaatatctaattcttcaaattgactcaaaattttaatatcttgtgccacactgacaaaagccttttgatcaacatctttcatgatttgatccaaaatttccatttcgtaagtagtaataaccaaaatcagaatcgtttgagtttcttgattatatgcgcctagtgcatatggaatgatcgtgattccacgacttaatttttcttgcagagctgggataacttcattcggcttttgcgtaataatcgtcacctgaacttttttatgtttgacatacactagatctgtaacttttccacttataaaaatggataaaacactataaaaagcatagggccagccaaataaataaccggctaccaatacaatgactccattcaaaacaatcgaaatcacgccaatgcttcgaccggtgatttgtctgattgtaagaatgagcgcatccataccaccagttgaaagtccatattttaatgccagccccaaagaaaagccattgattgttcccccaaaaatggcgcaaataatcggatctgtagttagctcagtacttgggacgatgtggatggcaaatgatgcaaccgttacacaaataaccgtatagatgacaaacttgcgattaattttgaaccatgcaagcataaacattggaacattcaggagataatatataactgaaatagggacttcaatatggcttttagcaagaccagtcgcaatgatttgtgcgatcccagttaagccgccggcataaatattccctggctgccaaaaaagattcagcgccaaggaatataaaaaggcataaataagaatcactgttaattttgtaaccacctcttgccagatatctattcttttaaaacgtgacataatcctctttccttttctttaaataaaaggaagacatctcttcctctgatatcggtcaatcggcacaaatcaggtcatacctttaaaactgcagatccaatgtcacttgtttctcaatttcttttaagaaatctctatcttctaaaacggtagttgctttgtttaattcatcatacatttcgatgtctttatcatgctcaataaagtttacttgtcgacgaaatgcaagataagctgcttttgtgcctttgccaagtcctgactgatatcctttgatgtctagtgcttggcaagccgccatgatttcagttgcaacgacccgccgagaatttttgacgatttctagagctgttcgggcagcagttgtacccatgctaacaaagtcttcttgattttcacaggatggtattgaatctacactagctgggtgtgccaagattttattttctgaaaccagagatgcacatgcatattgtgtgatcataaaaccagagttcaaccccggatgtttcaccaagaacgaaggcagattacttaattggtgattcaccaatcgttctactcttcgttcagatacattgccaatctcagcggcagcaatacccaaaaaatcaaatggttgcgccaaaggttctccatgaaaattccctccggaaatcacttcaccatttctagaaatgattggattatcagtaactgaattaatctcaatttctactttttcttttacatatgcaatcgaatctttactagcaccatgaatttgcggcatacaacgtaatgtgtaaggatcttgaacatgatctggtgtcgcttccgtaatatatttactatcttcaattaaacgacgaatattacgagcggttgctaattgcccactttgcgggcgaatcgtatgaaggtcttctttaaaaggactagaaattccgtcatgaacttccaatgagagtgctcctgcaacatctgaaagttttaataactgaatagcatcatacgttgccaatgccccaaccgcgttcaaaactgttgtcccattgataaaagctaatccttctttggcacttaattgaatcattttcaatcctgctttttccattgcttctttcccagaatacaacgtgcccttataataagccttacctaaacctagtaatggtaaaaccatatgagctaatggggctagatcaccggatgctcctaatgagcctttctctggaatgtagggatggacacctacgttcaacatcgctaacaatgcttctacagtgcttaaacgaataccagaatagcctttaatcaacgaattaattcgaatcagcataatagctcgtacaatatcttccgaaaatggctcgccgtaaccagcagaatgagtacgaatcaaattttcttgtaattgcacagtgtcttcttttgaaatactgacattacaaagagaaccaaatcccgtattgactccataaacaacacgacgttcctctacaattttatcaacaatcctgcgcgactctttcactgcttctttggcactttcggctattacacattgacgatggttgcgtgctacagccactacgtcttctaaagttaggctagcaccatccaaaataatcatttcttgactaggaatggtattctgagcttcttcttttatcaacattttcatcgttttattccccacttttctaataaattccttccaagtatcagtttccacaagttttctaatttacttgcttcgatttattattgtttaagagtagatacaagatgcttgctactataactccaataactccagctattaaattgatcggattggccgcagcgaccatccaaatactaacaactatggagataattggaatgactggaccaaacggcagccggaaagcaggcacattttccatgtctttttttctcaaccaaataactgccaatgcagtcggaatgtactggaagaaacgaaagactacggacagttccgctaattgttcaaatgatccgcttagtagaaaagctatggttagtaaaccagaaaaaataatagcaacgataggtgcacttttattattttttttagcaatcaccttaggtaacaatccttcatccgcgattgaagctccatatcgcggaatcatcagagaatctcccatattcaagccagcaattgaaatcaaggccccgattgaaataatccatttcccagctggtccaatcatttcaacaaaagcatcttgaactggcgcattgctttgtaaaattcccgttccaagcatggcaatcgttcccgcaataatcataaaataaagcagcgaaacaatacttatggatccaataatcgcttttggcacattttttttggcattccgcatttctccagctactacaggtaaagcttcaaaaccaataaaagcataaaagacagtgagtgacgttgaggccatggctttagataaagtcatgtcaggattcaattgtagaaacggtgtaaagtttccttgattgattccatttttgatgaaaaaaactgcaatcagtgtgaaggcaataattggaatcaatttagctattgtaataacaatcgtaaaaatttttgaagtcttaatccccatactattaatcacagataagaaaataaccaaacaaatgctaatcaatgtattctgtccttctaacgctggaaaagtttggatcagaagtttcgcaaaacctgcagccattgcagcccacgcaataatcgtcacaaaccaccccagaacaccaacattaaatccaataaaatcgccaaatgctgttttcgaatattggaaagctccgccattcttattgaagtaacccgcaacttcggcgaagcaaacggccaacatcaaaaccaaaaccgcatctaaaaccattgcaacaagagaagcaggacctaaatcttggtaaatggttcggggcaaaagaaaaattcctgaaccaattactgcattgattccgtatagcgtcgcaccaccaaagctaaattttgcattctcatttttcgctagctctgcggagtcaatgtctttaatatccgttatctctgaaacctcgacatctttttgcatactatttcacctcttctttttttattgtaaaacgttttcaattacacgttttattctagtaagcagttcatgttagctattttacaaagagagttccctccacctccttgtaaaatagctctaaactgctagaataatccggttatatttcctttttcatcaatatcaattctttcagctgctggagattttggtaatcccggcatcgtcataacagctcctgtcaacgcaacaataaatcctgccccggcagatactttgagattacggatcatcacagtaaaatcttttggcgctccaagtagtgacgcatcatctgaaaatgagtattgggtttttgccatacaaattggataattaccaaatccaagacgttccaattcctttaattcttttttcgcacttggtgccaattctacgcctgccccaccgtatactttttggacgattttatttagtttttcttcaattgaatcatccaaatcatagacatagctaaaatgatttggctcttctgctagtgcaactactttttccgccagctctttaccgccagcacttcctttcccccaaacatcagatagaacaactgcaacgtccatttctttacaagctttctctaccgcagctaattctgcatctgtatctgttggaaatttgttaatagctacaacaactggcatcccgtatacttctttaatattctctaagtgtttagacaagttaggtattccagcaaatactgcatcgacattttctattcctaaatcgcttttcttcacgccaccgtgcatttttaacgcacgaatcgttgctaccaaaacaaccgcatctggtcgtagattagctaaacgacatttgatatctataaatttctcagctcccaggtcagcgccaaagccggcctctgtcactgcataatcggcatactttagcgcaagtttcgttgccaatacgctgttgcatccatgtgcgatatttgcaaatggacctccgtgaataaaagcaggggcatgctccaatgtctgtacaatatttggctgaattgcctcttttaatagggcggccattgccccttctgctttcaaatccccagcagttaccggctccccatcgtaattatatgcaacgatgatttttctcagcttattttttaagtcagcaatatcgttagctaagcatagaatggccataatttctgatgcaactgtaatgtcatacccatcctcacgtggcacgccatttactcgtccttgaagaccatttacaatgtgacgcaattggcgatcattcatatctaccacacgtttccaagtaattctgcgagaatcaatttggagaaggttcccctgatgaatatgattatctaatagtgccgctaataaattattggcggcactaattgcatgaaaatcaccggtaaaatgtaagttgatgtcctccattgggactacttgagcatgtccaccaccagcagcaccacctttcacaccaaatacaggacctaatgaaggctcgcgtaatgcaatcactgcttttttcccaatggctgtcaatgcatcgacgagacctactgaagtagtggtttttccttctccagcaggtgtaggcgtaattgcggtcactagaatgagcttgccatcctcgttgtcatccaatgactcaatattattgatctttgctttatattttccataaagagacagattttctttagcaataccaattgattcagcaatttcttcaatcggcttcatcacaacagaatttgcaatttcaatatctgataagaccatgtccataaacttcctttctatctaccaatctaaatgattacagcgattcaagtatttgttgataggttgcatcagcaattttgctgccttcctcaactagcgattccccggctttgcggtattggcgaacaaacatttcgtctttgatgcttgcaaggttaatcaatacattcaaccacgcaccttgtaaagctgcctttaaattcaaagcagctactcccaaatcactagcagcattggtatttgatttgccaaccgcagcctgtgtgacttttaacgcatccacaattttttccatcatagaaaaaggtgtaacagctgctccttttaaagcactctgcattgcttctcggcgggcttttttttcttcttcggttgtttttgggagtccaaaaacagctgacacttgattaaaagcttctgtatcttcatcaattgccctgagtaaaccctcttgcaaagatttagcttttttttgcagtaattcaatttcgtcttcgaactctgcatatttttttttgccaatcgtgagttctgtcaccatctttgtcaaagcaattccctgtgcggcagttaatgctgaagcagatcccccacctggtgccggtgtatccgaacctaaaacagcaatgaaatcgtttatttgcatctcaacgagtttcatgacaatccccctatcaattcaataaatgattttcgaaaacttgcttattataattgaactcttcaatctgtaaataatattcagcacaatcaatcaaggcttttgctggcgttaatccgattacttcactgccaataaccgacacaccataacgttttgcttcaaagcgaatcgtttcaaacacacgatacagcggtgttttctcgaagttcaccatattcatagatacttgagcaatattacgatcttcaagcatgacaccaatacccttgcagtatttccatcctccagaggatccgcgaacaattttagcgattttattggcaatctcaatattatctgtatccaaattcacattgaatgcaactaaaggcattctggcacccactgctgtgacaccagcggttggatgaattttgcgttcgccataatctggttgccattcttcttccaaaagtttttctggcattttctcaaattgtcctttgcggatcttcgctaaatttttacgtacgggtgtagtggctgaatcttcatatagaaaaatgggaatctgtaattcttcattgattcgttgagctactttcttagaaatagcaatgcactcttccatggtgacatctttgatcggcacaaaaggaaccacatctgttgcccccatacgaggatgttctccttgatgcttcgtcatatcaatattctcacttgcaaacttcactaattgaaatactacttcttggattccttcttcatcaccaacgagtgtaaaaacactacgattatgagatgtgtcagaagaatgatccaacaatgtgacacctttaacattcttagcgatctccaccaacccatcaataaccttttgatttcttccatcactgaagttcggaatacattcaattaattttgtcatggtctattgctccttgtttttattttgaactttaggtacggcataaatttgttcttactacattaaaaaaaatctatgaatagcgttatttttatttcaacacctcctaatatcccaatttatttgttaccgctttcattcaccgaaatcagcttaacactctttcaaatcggttgcaaactccgtaaaaaaaagcttttcataattttttcataattaaaattctgtttttttttggaaaatcctcctaattgtcttccgcatttttttgtcttttattttatttgacctttttttgactttcttttttaaactgaaggtaacctatcgttgcgcattgaataaaaaacaagacagactttatttaatctttttgatttcttttacaaagtactttttttgcttgaataggtacactcataaacaaaaatttgtaatcaacacataaaaaatcttcaagttttatttttgacgtttaatagtcggtgcccttcgttttttatacataaacattagaaaaaaataattattatgccgataattcttttgaacttttggaaaattatcagcaaataaagaggtggaaacatgaagaaaattgttttgttgattgattttggcagcacatatacaaaattaactctggtcgatcctagcgccatggaagtccttcatacagctcagattcccacaagtagtcaagacgggttacagttgtgctatacagaagggaaaaaagcattacttcaaacgttaaaattttctgatcaagtaaagatagaagaatatttctgttcttccgcagggggaggctttaaaatgattgccattggtttaactgagagtttgacattagaagcggcgaaaagagcggctctgggggcaggcagtcgtattcttcaaactttttgttatcgtttgacactggaccagcttgaggaaatagaacaacaaaagccagatgttgttttgttgacaggagggtgtaatggtggaaatcaagaaatcatccgtcacaatgcccgtcttcttactcagctttctacagagattgcattgattgtagctggcaacgaagacagctatggagaattatctaagctcttgcaagatcgaaataatacttactttaccgaaaacgtgatgcctgatgttaataagctgaatcctattccggttagaaaaattgcccaaaaagttttcttagaaaaaattgttcattcaaaagggattcatcaagttgcagctcacgcaagtgcccccatcatccccacccctaaagctgtattagctgcagccaagctattaaaagaagggacacaagcttcgaaaggttttgggaatttagtcgttgttgacattgggggagcgacaacagatattcattctgttggagatggtttaccccaagcagaaaatgtttactttgaaggattggaagaaccctatttgaaacgtaccgtagaaggtgatctcggtatgcgttcttctgcagtaagcttgctaaggtgcattgtagaagattccaatcgaatcagggcattgtcttcttggaaatttacgactcttcaagctgcttgctattatagatgtagtcatccaacatatgtaccaaagacacgagaagaatgcctaattgatcaatttttagctcaatcggcaacggctatcgctttagagagacatgctggaaagataagaaaagaatatacgccaaatcgtacaatctactaccagcatggaaaagatcttcgaaatttccaaacaatcattggtactggtggcgttatcattcatagtcaatctcctaaaaaaatagttaaacctgacatcaagggcatgtctaatactttgctaccagtagatccgcaaattcttattgaccaagactaccttttatctgcaatgggacttttaagtcaaaactatcccgaagcagcattgaacattctaaagaagaaactttatcgactcaacccttagttgtgaaaagaagctgtgacaaaagttttgtcacagcttcttctgaataagcggttagtaatagctttttcggaattttcttctcatttcttgaaactgatcacatctgtcacagcctcagatatcaatcttatagatttacatgaaagaattcttttaaaacttgcaactcatagcggtctcgatattgactaaggttgtccattgcttttgtcaaatagtacgataaatcttctttaaccaaatgatttaattgtagatttgcatgcctctcatttagacacttttcttttaccagtgctttgataaaataaacgagaccactatcacgcggattagctagttgattttggtaacagcttgtcttttcaataaactctatcacttttccataatcttttttgtgaaggtaaattaatgttaaataagcatttaactgaacccttttccataatgaagtagtaacttcaaaatattcatttgccttgagaaaataggtttccgcttgatcataatctttttttgcatacagtgtaattcccatatcaacataaaaaatagccaagctcgtcaccaaattatttccttcacacaaattgatggctttttgttgcagtttgatagactgctcatagttagaccgcaaacgctggatttctgctagataatcatacgcggcagcaatattgctgttatacttttcgtcaaaacggttggcaatattaaaaattgtaatcgattcttggatgtacgattctgcttgatccaaatcaccgatcatcagatgatacaaacctttcaatcgcaataaaataccgatagattcgttgttattggcagtaattgctacatccattgccaaatcgatataatgtgccatgtccgtcgcattatcagtttgaatatagtaataaatcatttgacgatacccgcgcaataaataggttgttagatgaaagtctttcgcttttacgattactcgctgaatgttttcaattcctcgattatagtccccggaattgatgaaaaagcgaccttctagataaagaaatctgacgagcaacaactgataagtactatcttctgcatactgtccttcaatttctttaagtcttgcacctatctctttgaatttttctaattcatttggggcttctcttctgaccaattcacgtgatgccaaatgttcttgatgatagattggaaagagttcatgttgaatacgtaaaaataattgatgatgagaaagttcataatctaaggacttaagttcttgatgcgcctgacgatagtgatacccgattgctgccaataattcgctatcgttttttgcttcatttaacttttgctctaataaaacagcaattttttcatgtatcacacgtaatttcatatctgattgttgtgcataaataaattgtttcatcttattatgtttaaaactaaagcatacttcatcgagataaatattctcattgatcaatccttgcttgattaaattatcgagcgctttataaacctctgctttttgaccatcgactaactcaattagtacactcataaatgctaatttctgaaagaaagaaatcaagtcaatcaattccacttctacaggcaataagtttacaaactgtagactaagcttatcctttatgttttgcgttaatctttccaatgtgttgctctcttccaattgatttaagtactcactaatgtacagaggaacaccttctgattctctcataataaaatctattgtagatgtttggaacgtatgattaggcaattgtttctcacaaaaagccctgacctcaaaatcttgaaatggaagtaatttcaatgtgataattttttcatagcggcgaacgcttacgataaagtcttgtatttccttgcgaaagcttgattgcaatgtcatgataaaaatgatatcccgatgggggttatgcagaattaaactcgttaatagcctaatactggttcgatccatccattgtaagttttcaataaaaatgacaacaggagttattttccccaactgttgcaaagcttccgatatgcattgtgctaaaaaatttaactcaacagaatcaatggaccgaagtacgcgttgtgctattaaatcattaaaaaatggaaattgttgactaaatgtttgttgccattgactaacttcagctagcttttctctttgcaataaatggatgatctgttgcagtagttcacgccatggacgcaagcaatgctcttgttccgttttataacaagtcactttgaatagctcataaggatattgaatattttctatgactaattgacacaatgaagactttcccacacctaaatctccagtaactaagaccgattgaaatggctttttttgttttaaattcgccaaattcaactccaagcgctccacttcattggatcgaccataaaagtgattcgcgcgttttttttgacttactcgctgtttttgattggcaatctgtaatgttctttgatagagctgttttgtttcttcacttggttcaattcctaattcatctctaagtgtctctaccaattcataataggtttcaattgctttcccattgcgatgattttcaatataaaattgcatcaataattgataattgcgctcatcaaattcatcaattgcaattaattttctgatatttttttctacatcggctacggcatgaaatgaaatgtcttctgcaaccttttgatagcagcattcaataaattgatgttcatagagattacgcatcttagtcaaccatgcatcaaacagatcggaatctttcaaataaaatccttttaaaaattcatcccgatagtcttccagatgagcataagcatccttttcaaaacgatacgtatcactctcaatgattaaatcagaattaaacgtcaaaatagatttattcggtgaaacaataaattcccctcccaacgagcgatttgcttgataaattgtatttcgcaaattcttcttggcacttttttcatctttactaggccataaaatacctgctatttcatcccgactaatttgtttgttgatcaccatgtaatacagcaaagcattgatttttgaaaaagaaaaaatttttatgttcccatccacttttattgttggtgttcctaataatttaaacgacaatgtatgctccatcactgctccttctttcagttttactaatctttattttaaaacaaccaacctaataaagataccgcttacaacactgtccattataaccttctaaaccttctaaaccttttataagaaaaactctctaactctatcactagaattggagagttctctgcaaaaagatttctaactatgctgacgttgcgagacgacaagatctccagccttatatacatgtgtaaccaaattagtcgcaaaaaaatacaatggaaaatcgatattcggtgcatcaaaaatagtaatatctgccgattttcctttgtctaggcttcctacgctctttgatcgacaaatagaatacgcagcattaatcgtaaccgcattaaagacttgaattggagtaagcttttgcataaagcaacctaactgcataataaactgtaaatttgctgttggacaacttccagggttactatctgtcgttaatgtaattgccatacccttgtcgatcatttttcttgctggtgcatacgtgtcttccattaagctaaaggtggttccaggcagcaaattcccgataactttggcttcgctcaactttctgattccttcgtcagttatcatcattaagtgttcagcactaactgcacctaactgtgcagcaatatctactcccccaatcgatgcaatctcgtccgcgtgtatacgtaatttaaatcccatttcttttgcggcttttaacaatcgataagattcttcggcagagaaaaccccttcttcacaaaacacatcacaaaattctgctagtttttctgcttttacttttgggagcatttcatcaatgattaaatcaataaactcattagaacgtccctgatactctgctggaatcgcatgagctcccataaaagtagaaacaatatcgattgcatgttcgttattcaatttttttgcaacttccaattgttttttttctgtttcccaattcaatccatagccgcttttagcctctactgttgtcacaccatgcatcagcattttatccagcagatctgcagatttattatacagcgtgtcaaatgaagcttgtctagtcgcattcattgtacttaaaatcccaccaccatcagctaaaatctctaagtaaggcacaccatttaatttcttggcaaactcatgctctcggctaccaccatatacgaggtgtgtgtgacaatcaattaatccaggtgtcgctagtttccctgtgtaatcaataatttccgtatgtttatcaaccaaatcattgtttggctgtccttcccctacgtgcaaaatctttccatccttgatagcgatatagcctccgttgatgattatcgcttcactcatctgctttcctctcaatggtgcaccctgatcaatcggacaaaaaatttgactaaaattgtttaaaattttttctgctttcattattcttactcctctacaaattattcatattctgagtataaaaaatcatagtctaacagaagtcaaacgatgcgtctcaaccatttataaaattggaataaaattatttgtgcggatagacgtttcgttgacaccgcttatatatactgagaattgtaagccgattaagaatattttattcattcaccattattatacacttgaggaggaaatattaatgattcaattacaagacatcgaacaagcgatgaaagttaagttagatgactttttacctgaaaaaactatttttcaagaaggcattcgccgcgcacctgatcgcggattccgtttaacaaaagaccagacagaactcgcattaaaaaatgcattgcgttacattcatccaaaatatcatgaaatcgtgattccagaatttatagaagagttaaagacacgtgggcgtatttacggttatcggtggtatcctaaggaaagaatctatggcaaaccaattgatgcatataaaggtaaatgtactgccgcaaaagcaatgcaggtaatgattgataataaccttgattttgctgtggcgctttatccctacgaacttgtaacttatggagaaactggtcaggtttgttccaactggatgcagtatcacttgattaaaaaatatctcgaaatcatgacagaggaacaaacattggtgattgaatcaggtcaccctttgggccttttcaaatcaaaaaaagacgctccccgtgtgattatcacgaatggattattagttggggaatacgataatattgatgactgggaaattgccgaagaaatgggagtaaccaattatggacaaatgaccgctggcggctggatgtacattggtcctcaaggaatcgttcatggcacgttcaatacccttttgaatgctggtcgtttgaaacttggaattaaagatgatggcgatttagctggaaaactgtttgtttcctctggacttggtgggatgtctggcgctcagggtaaggctggagaaatcgccaatgcagtggcaattattgctgaagtggataagtcacgaatcgatacaagattagaacaaggatggatttctaatcttgcggaaactccagaagaagcaataaacattgctacaagctatctaaataaaaatgaaaagacttcaattgcctatcacggcaatattgtcgatttattggaatacattgaccaaaatgatgtaccagttgatttactatctgatcaaacctcttgtcataatgtgtacaatggaggatactgccctgctggcattacgtttgaagaaagaacaaaactattagccacaaatagtgaaaaattccatcagctagtggatgaaacattgaaacgccattaccatgtaatcaagtcgcttgttgcaaaaggcacctatttctttgactatggtaactctttcatgaaagcaatctatgattctggcattaaagaaatctcaaaaaatgggattgatgataaggatggcttcatttggccatcttatgttgaagatatcatgggaccaatgcttttcgattatggctacggtccatttcgttgggtgtgcttaagcggtaaacacgaagacttggtcgcaacagatcatgctgcaatggaagtgattgatccgactcgccgttatcaagaccgagacaattacaactggattcgtgatgcagaaaaaaatcaattagtcgttggtacacaagctcgaatcttataccaagactgtatggggcgagtgaatattgcacttaaatttaatgaattggttcgagaaggtaaaattggtcctgttatgctaggacgtgatcaccatgatgtttctggaacagattctccattccgtgaaacatcaaatattaaagatggaagtaatgtttgtgccgatatggctacacaatgctacgccggaaatgcagctagggggatgtctttgattgcactgcataacggtggtggtgtcggaattggcaaatcaatcaatggcggttttggacttgtactagatggttcagaacaagtggacgagatcatcaagtcagcgattgcctgggatacgatgggcggagtggcacgtagaagctgggctcgaaatgatcacgcaattgaaacgtccattgaatataacaaaatgaatcaagggactgatcatatcactatcccttatcttgcagaacaaagcagcatcgatgccgcaatcaatgcgctttttgattaaatcaaacacggattattttttcccaggaactgtgatataagtactttttaataaactaaacatctgaactgcatgataccatttacggtgaagtcggtcttcagcacaatcataagagaaagacaattcatcattatagagaacggataccttttggctagtttatacttctgtcacacttccttttttaagtgatctactgaaaggaagcgaaccatgtacgcaccagaagaaattgttgaaatagcaatcaaaaacggggcaaacaaaacaaaaaaaacactaatagcaaaatgtttgttaggctttattggcggtgctatgatttctttgggatatttagcttatatccgagtatccgcccccataccatcaaacttttccggattagggacattgttaggatcagcaatttttcctattggattaatcgtcattttactagctggcggggaattaatcactggaaacatgatggctgtaacaattgccttttacgatcaccggatttcttatcagaagcttgtaggcaactgggtattgattacaatcacaaacatgattggagcaatttttgttgcctatttttttggttactttgttggactgacgcatactgatgtctttagagaacaggtcataaaaatagcgcagcacaagctaaacacttctttttcacaagccttcatttccggtattggctgtaactggtttgttggactcgcattatggttatgctacggtgcaaaagatgcggcaggaaagattctatctatctggtttccagtcatgattttcgtggcaattggattccagcatagtgtcgctaactgctttgttattcccgcagcaatctttgaaggagaagctacttggaaagcgtttgttttaaattttatccctgtctatctaggaaatatagtaggtggtgcagttctcgtatctggattttattatcttagttattcagcaaaaaatgctactaccaaagataactagcacagaataaaagaagatgaacatatgtatcctcaatacgtatgtttatcttctttttaagacgtatacctattcgttattttccactataaaatagttcagcacctacttcgcaaatgcatcttgccctccatacttattctggtggatgatctcactgatcaagtactcgtagatggaacgcggaatctgtacaccatcttgctttgctttctcaaactgtagttgactgatctcgcctggataatagaccgttgattgtccttctacaggcggaatttcatgtaattcatttaccatttgatccatctgttctttaaatgccgaaagatccgtaaagcgtttgggatcaatgactagaaacatttgtcctaggcgtcttttttcagtgagatcggcatacatagaagatacatgtttcccgaaaggcagtcctaacagtgaaccggctaaaatatccaccatcatcatcaagccatagcccttggcgccagcgatcggtaataatcctttaacgtccgtaggatctgtggttggttgtcctgtctcgtccactgcccaattttctgggatcggctgatttttggctcgggcatcgagtattttgccccacgcttgaacggtggtagccatatcaaaaacaatgggttcatgtcccgctcgtggcgcagcaaatgcaattgggttcgtgccaaagtaattgcgggtaccgccaaagggaactgccattggatctgattgacacatcgctaatgcgatcaactcttcttctgccgcttttttgacataataagccatggtaccactatgactggtttgttcgacaccgacataggcaattccagcttctttggcaagatggatcgcaatcttcatcgcttcattacagacgtattgtcccatgccattgtcgccatgaaaaatccctgtagcagggccggttttctcaaaagataatttaggcgccaatgtgattccgcctttagcgatccgttcggcataatagtccatgcgtacagcaccgtgggaatggacacctgttgcatctgcaatagctaaatgtttcgccgtttcgctggcagcttcttgcggcaacccagcagcaatcagttttttcttcatcaattcttccaattgagtaatagaaagagtgactagttcttccatcgtgaatcctcctttaacaataaaggagaagtacctgatagtgacaacagcgacttctcctttctcttattgattaaatatctgatagtccaattcatccgcagatttcgcaatgatcatcgcagaataaacatctgaattgacattcaaaatcgttcgcagcataccgacaaaccattctacaccagcaaaaatcgcgatactctcgattgggagtcctaattgagggacgacaatcgccagtgaaacgaggccagctcccggaacaactgcattcgccaaggacacgaatgttgcagtgacagccactgtaatcatttggatcaaatcaaaaggcatttgatacatctgggcaatcgtcatcactgtgatcgccatatgcatcgcagaaccattactatttaaagacattcctagtggtaagactagatttgtgatacggctgcttaatcccagcttatgttgggcttcttccatagcgaccggtaatgtgatggcggacgaggtagtcgctaatgccataatggtcatatttttcatattttggatcaagcgccatggattcacgcggcaatagatcatcaaagcaacaatccataaggcaagaaacgtcagtgtggctaacccatagattagaagatactttcctagaggtaaaatgatctgtaaccccaaagaactgatcgttgaagcaatcagcgcaaagatcccgatgggcgctaaaatcatgacatagcggatgatcgtcagcacgacttcattcaagtcaacaatgattgttaataattgcgactgcggattcttttgcaaaaaacgatttaaagcaatcccaaaaaacagggcaaaaacgatgatctgaataatcgatccttttgacaaggcatcgaaaatattggtaggaataaaattgatcagcgtctccgatggtgagatttcttgcgcttggacagtgtcagcagccgtttgtgaaaaatcgatccctttaccaggggtaaagaaaactgccattgcgacaccccaagccgcagcaagtaaggaggaaatcccgaagaccgcgattgttttcccacctaaccgtgtcaattctttgggggcaatgcccccaacagcctgaatgatttgccctaagatcaataccggtattgccatttgcatgagccgtagaaaaatatcgccaacgatttttaagtgaacgcccgcttgtgaaaacagcaatccaaaaacgatccccaacaaaacagcaataacgatttgtgtgaccattggtattttttttattttcaccttgatcccctctttatttgcggagtatagtccctacctgttgatcaagtacagctaaattttcaattgaagtaatgatcgctgtccttgacgcatcctcgtttacaaagccgatggctgcctggatcttcggtaacatactgccagcagcaaagtgtccttcttcaatatactgttctgcttgctcgacagtgatttctttgagagcttgttggtctggttgattgtagttaatgtagatattatcaacacccgttaaaataatcagacgatctgcttggacattgtctgccaaaaccttggctgcaaaatctttgtcattgactgcttccacgccaacatagtgctgattttcttgataaacaggtaccccaccacctccagcacaaatcgtgattaccccggcatcgactagggtcttgatcacgtctttttcgacgatttcttgtggcatcggagaaggaaccacttttcggtagccccgtccggcatcttcttgatagacacccccggttttagccatcgctgcttccgcttcttctttatcataaaaaggaccaatcggtttcgatggtttctggaaagaaggatcgtttttatccactctgacttgtgtgattaaagaaatcacggattgcggcacatcccgttgggcaaattcattggttagtgcatgttgcaaccaatagccgatacttccttgtgtcatcgcaacacaggtatccaatttcagctgtggatttttttcgctttcagcagctttttgctgaagcagcaaattaccgacttgtgggccatttccatgacacaaaatcacttgttcgcctttttcaacaaaatcagcaatatatttggctgcttgagcaactaccgctttttgtccactatcactagggtctttatccaaaatggcatttccgcctagtgcgatcacatttaaactcattttactgtctccttctcattttccttcgctaatacggcaaatattcctaatccgatcagcagcaacacacacgataagtaaaaaccgacttgcattgatcctaatgaatctgctaaaaatcctgtgacatatggcgcgaggatcgaaccagacattccgatgaagttgtaggcactaagcgtcgtgcctaacgctccggctggtgcatttttcgttacaaatgtcaccacgattggatcaagagcaagcttgcccgtcaatccatacaaaatcaacacggcgatcaatatcgtgcggtctgtaacaaaggcaatcgcaaaaactgaaagtgtcgcaaggggtaccaagaaatacaccagttttttcgttgctcctgttttgtcgttcaaccgagcaaaaatcaaggcaccaggaatcgaagcccatgggacgagagaagcaataaatccaacacttgctccttcaaatccacgttctgcgatcaaaaattgtggtaaccatgtaatgataacaaaatttgcataaatgctagtaaaacataagataaaggcagccactaaattacgattagaaaaaatttgtttaagagagattttttcttttggtccttcttctttaaccactttttcttcatcttcaggacggatgactttctctttcaataccgtgtaaaacaagataccgagaatcaatgttgggatcgccatgataaagaatggtttgctccaatgatcgccattatccaaaacaagtttacttgacaatagatacccgccagaagtcccaaaagccattccgctgttgataatcgcattcccaacggttcgtttgttatctggaatcgcttctgttgataacgcgtattgaggcccataatacgcaccttgaccgataccggcaactgcgcgaatgactaagaacaagacaaaactcgtagctaatccactgaaatacgtggtcacggccagcagtacaaaaccaatggcaatgactagctttcgaccgattttgtccccaacgatcccaaaaggaatttgggcgatggcataggtcaagaagaagatactatttgctagacctagttgcgtattgcttaaattgaattgttctccgatcacacccatgattggattaaagatcgtccttgtggcatacattaagatccaacccacaaagaaaatggcaacaacttttttccaataattgttacttactttttcagctggtcgctggttgatagattccatgatttctcctcttttctattctaaagtgattgattccaatgctagcagcatgccaaaacacaaatcaatgcccgatgaatggccgattttcatgacatcctttacatctttttcgatcagctgctgatcttggcttttcaaatcagtcaataatcgatagatcaatgaattgacataacctttgatagaggcggaaatataggctttactgacatcagtagtagacaaaggaaccgctagagcagttgctaacttctccgctggttggtcaaaggcataaaacattgcttggtaagcaaccaatagatcatctccgctaggtgtcaatcccttccctcggccaattagataagcagtcacttgctgccaatctggctcgggatgccgcaacacttcaaaaatttctaaggctcgtttttctaaaggaagtccaattttttctactaaattttgctgggtcagtatttcttttaagctgtttcgctccgctgcagtgaaggtaaggtccttcacttgcagcgaaacaaaagcaacatctgtcaaaggcaaaacaatcgttcctttggtactataaaatgtcaaactatgactacgtatcttgactaaatttcccggctccacataaggcatgattgcccgaaactgttcttcaggtaaatacatcccaaatcctgccagatagctgcggtaattattgatgttgatcaactgttcattgacttgaatattaaatgaacgatcaaatacactatggattttccccattcctccaaattgctggatcggagacaggtaatcactcgcaatgattttttcagtcaacgtcgatccctagtttcttcgcataagctgttagagcattttcaaaacagcctagaggtgctctaaccgttcccgcaccaacttgtcctactccagcttctttgtgggcgattccagtattgatcactggtgtgatccctgtttcgactacttttcgaatgtcaattcctaaacatgttccttggaagtcccatgttgggatcgaaaatgtcgaattgtgtcccagacaaatttttgccatttcattcgatgtttccaaggcatcttcaaaaccgccggcaccgacaaaacgcgtcacgcctggtgcagcaaccatggccattgccccaacaccgacggtttccgtaatggcgctgtctccgatatcaggattaccgtctgcttcagtaaagccggtaaagtacagaccttttggcgtattgaccggggcaatgtgccattcgtcctctgtttctgcgatacgaatcccaaaattgacaccgttacgggtcatcgttgtcaccactgtcccttttgtttctgaacgagcaccgtcaacgatggccttaccggtagccatcatgatattcaagaagaattgatcagtatctgctaagaacttgataacttcgtacttttgatcttccggaatatctgtttgaatgattagtggcgaaatttctttcaagaagttcaatgaggccgcaatgtttcgttggtggaattcatcccccatcgtgatcgaacgcgcgatcaagacattcaaattgatgccttcttctgtcaactgcaatgctttagcgatcgtcggtcctaaaacatctttgatccaatccaagcgatcaatgacttcttgggaataagcaccaaaacgtaacactttaccgataccctcgttcaaaatacagtaagcacgatttcctgtcagacgattttcaaccacaaagacaggcatgtttgcagaagtgatccctcccatcgggccaacagcttgtacatgatgacaaggcatgaaacgaacttctccgctttccaacaatcggcgtgcttcttcttcattcgttgcccaccgttcaaataacgccgcgccaatacaagaaccttgcatcggtccagtcatttctgaccactcaattggaggtccagcatgtaataacgttttttgctgctcatttagttcagcaatgactgttttagcaggtaccacatcgatcaagaaaggttgcgcattcttgattttgtctgtcacttcttggttgtccgctgtaatttgatcctcaaaatcttccagtgcatccagaatgcgaatcatttttttattgccgctcgctctaggacgccagttaaattgctccgtttgtccaccatattgcaagattgattcattaaaactttgtaagccgacattgatgattcgcggttttgttgtcaataattccatcacttgctcactaaccgttggtacatcaatcgttgtccccgtgtagtcttccaccgctttatctgcttctgacatttcgacaccttttaacaagagtgctaattgaacagctttcgcgttgctttctgctacataaacccccgctgctttcaagcgatcgactgcatcttgataattttgcggatctttcgtggttccgcagactgtagccacgaagtaaagatcacccccagctgttttagcttttgtttgtgctgcttcgatggcaggtagcaatgctccgaccatatcttcatgtgcaccgtaacctaaaaccacatcgaacaaaataattcctgtttgttcatcctctgcatactcttcgattttttgaatccgtacctctggatcgatcattggatgaggttttccttgcgtataaatatcatcgcctaaatcgatcacatcgtagccgtgagaatgcaaaatatatccttcttgcttgactaaaccttctaagttcaacgcttccgaaatcaacatgcccgcttcagcagctagtgtgccgccagaataaaggcctttaacaactttgtctttgtctaaagtggatacgtttggtttgtccaattttgtaaaataattccgtttgacagcttcttcatttgctaaatcaacagcgatttgtgcagtttcttccaatgtgtgtgccaagtaaacttttccttcatgggcttcaggtttttctcctaagaaaatagcaacgactggcttgctgatgctttgcagcaattgaacgacttcatcccgcacttcttttgcaggtggcttcgagatgacacaaatcacatcggttggttcatgattttccagagcgacgatcgcatctttcacagtgatggctcccaccttatcactgagatcacgtccaccagttccgattgcatgtactaccccgccacctagacgatcgatgatcgttgtgacttcttggatccctgtccctgatgcaccaactacaccaatatttccaggtgaaaccacattggtgaaggcaatcgggatactagagatgatccctgttccgcaatctggtcccatcattaatagtcctttttcatgtgctaatttctttaagcgaacttcatcttcaatagctacattgtccgtaaaagaaaaaacatgcagaccattcttcaaagccttttccatctcggctgcgccatattctcccggaatactgaacaacgccacattggcatccggcaaagcagtcagtgcttcttgccaagaagctgcagcaggtttctctttgtcgtcacctttagcggaaagatcagctagaaaggtatcgatcgccggtaaaacttcctccatgatttgctcgtcttcactgtcgacaacgatcatcatgtcattcggggaagcagcttctgcttcaggcgtcagcaagccagtgttatttaaaatatctttgtttgcatctgtccccatcatgatctgactcattgtcacgccatcaagatcattgatcgtattcgtcaacaacatgagattgatcgaatcttgatagttgttctttaagatcactgtgtttaacatttgttctcctccttttcttatatttttattctaacgcgacttgtttgcgttttcattggataaaagtctaaaaaaatgctatactttttatccaaaaggggaaaaaggagaatcttatgcaattaaaagaattgattgagctgccgcttttcaaaaatagcaagacactgactggcacgattggtttaacaaatccagtggcctctgtcatggtgcttgaagccatcgatattgaaaaatggagtaagaaagatcagttgatcttgacttcattctatgccttcacggatctttctatggatcagttgcgtgttttttttgaaaagatgcagcagattggggtcagtgggttagtcgtcaaagtcgatcgcctgattccaatgattcctgaatggatcattggtcttagttttgattatcagatcccattgatcaaagtacagcaagatgttagttacgaagcaatcatgttggcggtttatgaaccgcttttgaatcaccaaacacatctcttgcgaacctactatgaggtccgtcagcgtttcatgaaggttgaacgcaaccattcgtcctttgagcagatcatgcaagagttttatcagttgatcgaaaaaccttgttcattacggatcccccatttggatgttcaagttgcgatcggtcaatcctttaagaattatgtagtcacaaagagtgaaccaatgaaaaccatcgaattcacaaaaaatcattatgaatatctagagcttttttctcatgagaacaatcagtatgtcactgcaatcaaagtggatatcatcaacccattcaatgacttatgtacattgatcgtttatcaaaaagattctcagatccccgaagcaaaggtcatgattatcgagaatgtcgtagacgttatttacgaacggctgcaaatggaatatcttctaaaaaaagagcgctataatcggatgaacaatctggccgaagccattttgcaaagtacaccgaataattccgaagaattagctgcattgctgcaagaggcacaattagatcgttatgattactaccaaggaattgcttttgcctccaatacctttaaagataagcaaagaaaaatagctgtcctgcacaaattacgggcattgaaaactgcccatgtgttttttgagcatcataattatttagtcgtcctgtataattttcagcagctagcccaagaaatcagtaaaaagaacttggaaaaacaatttgaagtctctctcttatcagaagaatctgcttgcttagcagtcagcgaagtcttcactaaagaacatatcaaggaaatcttgccccaatgtctcgatgccattcgcttcaaccgccagttctatctaggaccgatcttaacttacagtgatttaggaatctttagctcctttatcaaagaaaatcagctggaacgactgcagcaaagcattcccccaaagttgtaccaaatgtcagaagaagacgaggaattattcactactttctatactttttttatcagcaaccgcaattacaagaaaactgccgaggctctttttctgcattcgaaaacgattcgctatcgtctcaacaaaatcgagcagttgctggagattgatttgacaaatcctatccaattggtcaattatgaaatcggtacgtatttattagaattgaagaaaaggagtcgtttataaatgaaaacagactttttattatctaccggtgcctcagttagtctttatcctgctgattccattgagcaagagagctatctgatttacttgcatggcggtggattcgtttacggcagtcggcaggatattcccaaaccattgatcgaattgtttcatgaacacaactatacgatcctatctatggactatttgttggcaccaaacagttcactttctgaaattattgccgctacctgggagaatttcttggaattaaaagcgaaagtaatcaaggagcacccttatcgaatctgcggtcgttcagcgggagggtatttgatgatggcattgacgaaaaaaatttttgctgaaaaactgccaatgcccgaaagcctaattaacttttatggctatacagacttagctttcattgaaacttctcgtcagacgactcaaccaccattgtctgagtcccttctgccaaaaatcgagttaacagagaaagtatgggatgatccccagtttcagcgttatctcttttatatttatgcacttcagcaacaaaaattgactgaggtatatggcatttcctccaatcagttgacggattatgcgctcccagcggaagagctacaactctttcctcctgtttttagtacagccagcagtaccgatgaagaagtcccatttcgctatagtaaggcattaaagaaaattccagatagtaaatttatagctgtttatgacctgccgcatgacttcctgaaagaaacagatgatgaccaagtccaaatggttttttcccgtttaaatacctggttaaatgaccactgacaaaaaaactaaaacaaaatcatttttgacaggcagcagagtgttataaaaagaaccctctgctgcctttgatcaatttttcttctctttcaacttgaaaatcagcaaataatgcttacttacaccaagattgctggttacatgctatactaaaaatgattatttgaaagaaagaaggatgaatttaatggaatttgtgggtatcttatgcctaatcctcctcacaacaactcttttctctcatatagcaagacggattggcgtccctgctgtaattgggcaattgttggctggtgttttattaggaggtgcaggacttaattgggtacatccagacattttagtacacgatttttctgagatcggtgttattttgctaatgtttttagctggtttagaaagtgatatttctttactgaaacgctattttcgccctggaatgtttgtagcgatcttggggatcctcttcccgatgttattcggctatctcacaggtatcggatttcaaagcagcggaacggaagccttcttttttggtattgttctagcagcaacttctgtcagtatctctgtcgaggtactcaaagaactaaatgttgttaataccaaagagggttcgacgattctaggcgcctcagttgtcgacgatattttggtcgttttggtattgagcctcagcctttcctttttgggaggttctggtacgcaaagcacccctttgcctgtcacactatttgtagaacttatttattttgttttgatcttcttacttgttaaatggattgcgccgttcttactttctttagcagaaaagctctttgccaatgcctcagtcatcatcatgtctctgatcatctgtttaggtatggcttatcttgctgacttagtcggtttgagctctgtgattggtgctttctttgccgggatcgctgttagccaaacaaaagtcaaagaagaagtggaacacagtgtagaagcattgggatatgccgtgtttattccagtattctttgttagtgtcggcttagaagtagacttttctttgttgaatgagcaattactctttatcttagcctttacggtagtagctattttgactaaacttgtcggaggttttgctggcggaaaaatcgctcagttctccaacaatagtgcttggatggttggtgcagggatgatatctcgcggcgaaatggctctgatcattttacaaatcggacaacaaaataacttgatcacacctgctctttattcacccttagtaattgtggttttattgagcacactgatctccccactgattttgaaatattttacaaaaaaaatctattgatgcatcgtaaaaggcaaaacaccttctcaattcagttgagaaggtgttttattgtatttaaagcaaaaaaacattacaataaagctatataggatcaaaaggccgacaacacaccgtgaaagggcgtattctcatgaaaatcatcaagaactccattgaaaatcaccaaaagaaaaaagagcaaaaaaaactgattttaagaaaaaagaactttgaattacgtgaaagaggaaaagatcctcataaagggtggcaccccatggtcgataccggatccggcggtgcaaatggtgcactcgttaaaatcaatagaggcaccatcaatattaccggaaacaatgacgaaacattcaactattttttagaagaacaaagacgagttgttgatcattcaaaaaggcagaactaactcttgtttagaatgactggcaagagcacttttcaactgcttctacgataaatactattcaatccagacggtctcaatcagtaaatataatagtcatcgcttcctgcttgatagatctcgatcactaatttatgaggcaaacagatactggtttgtccattttgagagatccagcccgttttaacagcaatctgatctggactattgtcttctttcacgcgaatgttcccgttatttatttcgataatattatattgttttctagacggaacatacgtttttgtcaatgattctattttttcgaggttgaatcgatcaacctcctgcccgttgattcgaacaatggcgtaacgatcacctgtatgttccgtagcttgggcagagaaaaagactggcagaaaagatcctacaatcaatgcagcaaagaggaggtaatcaaagggttttaataaacgaataaaagaatctagcagcctcattcgtatcacctctttctttttttactgttttttctttaaaacagctagtcgtctagttatgtcctttgctgatttcaataattgaataaaaaggcattggcaaaaatcacctgattttgccaatgcctttttattgaatacaattaaaatcataaatgattggttgtgctcattatgcgtttcaatggatgcttcctgtttttgcatcattgtcagctgtggctacttaaatcgtttcttttttaatggtttcaatcatttgatcgattgcttgtttgatttcatcttctgtatcgggtaatttgcttggtaccccatcatgcttaccactgtcgacttctccggaaaaacttacttcatcccctgaaacattgatttggtcttgatacccttttacagcgatataggctttggcaagcacctcagtttctttcacatcttcaatttttttcattgtacttcccctcctgaatcttattgtagcaacttctatttaaaaaccaaattgatttgctttgtttttcccagttttaatatctccaaaagaaaaacgaaagtaggaagggctatttttcggatggaaaacaacaccgtttttttgttaaagtatttgcatatcttctattgaaaaaagcttttttcaattgatctttctattcgatagttggttctgataatctacggtcttcaaaataagccgataaatcaatcaattcatcctctgtaaactgattcatttctacttcacctaaaatcctttcttgcagtgttcgatccatttcccagaaatggtcgatctttttgaaatggtcagccgaaaacctggcaaatactggataaagaatcaagaagtcagtgtatgtcaggtccatggactctgtataatcctttacgtaacctgaatctaatgcttctttggttggttcaccctttggcccaatcaatcctttgtgatataacagctgaaaaatttctgctttagtgactgtcggatcaactttctttttgtagcaataagcctcttcaaccaatgatggatattggatcatcattattctctacttcctttcagtcatttgctttcgttatgatcggtttcttcaaaagatattcctttaatgacacatggtgacttcgtgtataattcccactggtactgtcaaaatggatggctggcttcttcaattgttgatttctccgccgccggtttttctttgcctttgaagtttttctagctggtactgccattttttaatcctttcttggaaaaatagtttcgttagctaatttttttcttgttccgcttgtattcatggataatttttagcgcacgcttgcgagtcttgatatttggacttttcaagcggcgataagcacttgccagatctgttttttccaatcatttttcctcctttatcgtcctacttctctctttaagattcatctgtattctttactcacttctttatttcacgaaaaattgcttttcgccgtagttttggtgaatatttttttaattccaatcgatagggtgtgttgcgctgatttttgctagtcagatagagtcgttctccggtttctacacattccaatataatattattttgcatcctcaaactccttccaaaaatctcttcaaaaacaaaacgtaacgattacgttttaaaccttatcatagaagagtagaagattcaagaagttttttatatttttgttattttataaatgaaagatgtttcatatgagtcgttgatcgtttctgaaaaaaattctatttaataaaataccagaaataaaaatagctgtttctcgctttaaaaactttgatttaacaaaaaaataagatacccgcaagctggtattttagaacaacttcttaaaaattgttctagtaattatccaatactttactggtatcttgttttttattattcgtgtgtcttcatccattccgtgatagccgataagcgttcaagacgtagattgggcaacccgctgcgagaaaggccatgactagaatgcggaaagaggatcaatttcgtgtcaatgtcattccgttttaatgccgtataaaattgttgcccctgttcttgcggacaacgcagatcattttcgccatgtaaaacaagcgttggtgtgctgacatgatctgcatacgctaatggtgacatttcccagagtatcttagactcatctaggtcatgcagcaactgatattttacgaaaaatggtccaatgtcgctggttccatagaaactgatccaattggagatcgaccgctgtgtgacggcagagcagaaacgatccgtgtgccctacgatccaattggtcataaagcccccataactaccgccaacgacatgaattttttggggatcgatctctggatgatgattaagcacgtcatccacacctaagagcaagtcttggtaatctttattgccataatctcctaggatcgagcgaacaaactcctgaccatagccttgcccaccgcgaggattcagcaaaatcactccgtaaccattggctgcatgaacttgcatttcgtgaaagaacgtctccccatagcaaacttgcggtccaccgtgaatatataaaatcgcagggtgctcttgactggtctcgatcggtggtagataccatccttggatttgccaaccatctgctccctcataccaaaaacgctgcggttcactgatcgacaggtcattcatcagagcttcattcggatcagctactagttctagctcgccactagttaagtcaagtaccgctagtcgacttgggatcgttggtgtcgaataagtgattgctaagtgggtctcatcaatctttgctgcatcagtgatatccattaattggtcaaatagtaatgtccattgtcctttcgtatcgacacggtacaattgcaattttccatgagtagtcactggtacaataaactgttgtttgttgatccaggttactgaaacaccacgatttttttgttgaaaatcaccgatgatcgtattgccgatggcaaggtcttgttcatttgagaggttgactacttcctttgtttcaaggtccatgagataaagatcttcctgggtaacaaatccataggttaggtcattccccaaaagcagcaattggttgccagataaagcagcaaaagaataagtcccttcaggcagatcagattcaaatgagtgatgctgattcgttgtcagatcatacgcatacagcatacttccataatgccattctcgttcgggtttcgtctctgcggtatagagtagaccttgctctttttccatgattgcttcaagatggatttccagatctgtttcaaaaatagttgctgattctttcgtcgttaataagactttctttacgcgcgtgattttctcagataaaaagcccgcaccatctgcttgatagcctaatttggtcgtcatttttattttaggaaaatcgttttcagcagctttttcttttgacgtatcgtattttttctcagagtcatccactcgttcttttgatttatctgctgagacttgataatagaccgctgtagcatcgtctgtccaaaaataattgctgattccctgctctgctactaagacagaagctcgtccaccgtttaacggcataatcattagttgatttttttctgtttctttctctgtcgacagaaagctcagccatttttcatcgggagaaacttttagctcggtactattttttaattggttgccccatacctgcctttcttttgtctctcgatcaacactgaaaatttctgattgatagcagttcttttcttcgttaaccgtattctcaagataaaagatacggttcccagccgctactggctgtgccacactcttcaactcaaacaacgactctttttttattttcatttacccgcctccaaaattaggataattccattatagcaaaatccgctgacgtgatgtcagcggatttactctttattcttaataggtatatccacgaacgatgccggattcttcaaaaccggcagagaaacccgtttgtcggaaaatcgtctgaccattttctatcaacgtcagcaaaatctccgtactggcactttcccgaataattcgattcatcacaccatccgttggtgccatcaaggaatggccctctttttctgcaacttcaatcgttagttcaagccctttttgcctaacaataatcactaattgaccttgtttgcgagtcacagaatctaagcgggcaccataatacgttgccaagcgatattctttatcccctatttgtaagactgaaataatccctaaaaaagccgttcctaaaaaaggaatgtctgctgctgagaaaaagaaacggacatcaggtgcctcaaatcgattgcattgtacccatagataggcagcaggaaacgaggttccccagtctttttcgagatacccgattccttcagagaaatcaagtgactgctcattccatagcaaagttcccgagaggctatgagccatacttaaaataccatggtagcattccataaatgaaaggtaggaaaaaggccccataatacttggggcatagcgactccgagatattggatgaaaggcaccgtaggtcaatgtgcctttaactgataattcagtactctctaatgatagcgaaattccttgttcactaaagtaattctccccgatcttaattaataactggtcttcagcagctgaaaattccgcttcactaaaggggaaataatgggatccttcatggctgatcacttgaataaatggctgttttcttccatccgattcaatcgatagccctggaataaatgcatacacctcatccccaatttgatgtttgaaataccatccttcaaaaaatgcagctttcttcgtattgccatgaaaaaaaagatctgttgtaatcgccatacgttccctccattcagctacaactagtgtagcatgaatggcacaaaagatgggttatgacgttttcaccaatccaggattgtaagatctacgatttttctgttcgtattctcgatcacggcttacttatcttttgcagaacgtctggtccaaaggatataaacagcaaaagctgccacaagcaatgcaatcaacagccctttaaaccgattatcatttgtcaaattctctttggaggcccatcgttgaaggattccaagtataacgaaaatcgttagcataaaggcgacgggataaaagtctttttccttgcgcaagaaaatcaaggcgcaggcagcgactaatagcaccaacattagcaccatatccattggataagataacgtcaccacaaaaaggttaggggtatatagattcagtaaaaccaaaccaccaatccagaccatcgctatcacccacaaaaccaaaaatttctttaacttactctgaaaaaaaccttgctttaaataaatcgttttttgcaccccaaagaaaaaaaggatgaccaaaacgactgaaaaaacagcagttgtcacataagaataaagatttaactgcaagacactatcagaagaaaagtcattaaacagtttgaccagccatgagacgccgaccataatataaatcaaattcaactgatcgatcaaacggcttttaggtgtgttacgcaacagctcatctgccatttctttaggatttttcccaaaatattcttctgctgtttcaccatgattttgggcttcaagtaaatcattggctatctcatagacttgagcaaccacagcatattcatcttgaaacaggctagaaaaaaataagtactccctcaaatcttcaaaatatttctgattgcttgctgacagttgttttgaaatctcatttgttttgtctcggtaataagctagttgttttttcttattcatgttctcactcctcaataattcgttctactttactcactaggttttcccactgttgtttaaagctgtttaggtactcttctccagcttctgtcaatgaaaaatatttcctgtctggtccatctggtgattttttcagttcagctttgatcaaacgttgtttctccagtttctgaagtaaggggtaaatcgtaccgccaacgatcgtttcaaaaccatatcctctcaattcttgtacaagctcgtacccataaatttctttttttgaaataatctgcaagacacatccatctaagacgccctttaacagttgcgtttctctcacgacattcacctccacgaatcatctcctactagtatgttttacctattagttgatttgagtttatcaaaaagcatctagtatgtaaagcatactagctaaaaaaataaaaacacagtacgtgtaaacatactgtgttttcggttatcttttgattcctcgcccataggaatcattataaggttgaaatgagcgatcgtggagctgggtagcgacatctgccaaccagtgaatatttctaatcaacgctcgtccttgtaaaattaaatccgcttgcttggtttgcagaatgtgttcacataaattagggttatccagcatcccaacggtagccactgggatcttaacagctgctttcatagctgttgcaaaaggtgtttgatacccttcataaaccgggatcgttggctttctatctaacaaaccgcccgtagagatatctaaacaatcaatcccatctgcttcaagccactgtccaatttgttgccattctgtgattgaattttgtttatcctctgtttcataatcggttaacgacaaccgcatccaaagtgacccatcaaagacagctcgaaccgcttgaacaatttctttgacgaaacgatagcggcttgctaatgatccgccatattcatctgtccgctgattcacgattggtgagagaaattgatcaatcaaatatccgtgagctccgtgcaattcaatcatgtctacgccagcagcttgcgcacgtttggctgctgccacaaaggattcttggacacgattgatttcagcaagcgtcatttcgtgaggaacagcatagctttcgttaaagcgaacggcgctaggtgctattgggtaacctgcatccgctgctttgcgcccagcatggttcaactgaagccccactttgctaccgaaaccatgaagcaatgcaacgagttttgataactcaacttgttgcgcttcattccataaaccaagatcattcttggtgattcgtccatctgcttccacagcagttgactcaatgatcagcaagccaactttacttaatgcacgagcaccatagtgaacaaagtgaaatggcgtggcaatcccatcctcttttttcacttcatacatgcacattggtgaaaggacaacacgattctctaacgataaccccgccagttcaactggcgataatagtaatgacatactgacattcctccgctactcattaaattgcattttctgcttgttatcagtatagttgttacacatagaaatacaagcagaaagagtttgtttttttgaacatgaatcaaagaacagtaggcgaatagaccaaaagtcaatttactttgctgaaaactacagtctcccgttagctaagtatggagttagcctttattatttttaaaaacaaaaaagaattgctgattaataattctatcagcaattcttttccctatagttattatacaggaaaaaacgagtaaaaaacagactagtatttttgccgccacctcgtataatgaaaaatactctgggaaatggatgtgaaaacagatggaaaagcaacgcatattagagaaacgtcatttatcttttgtttatcaaatattggtcactcgaaaaaaagccctacgctcttttctggataaaggctacgcaagccatttgcaagacctccaaacaattggcacggatattcgactcaattttgataacttgtcagacagtctggaaacttatgctgccattgagagcaaaaatcgtgaaattgaccaaatgaatctgagtttgcaaacagccgaaaaagaactggcagccgtagaacgtttgctccagtcaccctatttcgggaaaatagtcgttgactttcttgatggtgaatccgctgaatccttttatattggcatcaacggctttgcagttgaagatagtcataacttagtctatgtttggcgctctccaatcgctgagcttttttataacaatacgttaggggattcttcttaccaagtcaatgaacatgaaattgctgtatctattaaaaatagacggcaattaattgtcgctcatgataaactgatccgctttttcgatacttctgtcgcgatccaagatgatgtcttattgaccgcactagaaaagaacgacggcaaaaaaatgcgcgacatcacaacatccatccaaagagagcagaatgcagtcattcgtgaccaatcaagtcaaaccttattggtcaatggagtagccggtagtggaaaaacctcagttattatgcaacgggtcgcttatttattgtatcaataccgtagtcagatcacatctaacaatgtactgatcctttcacccaatcaagattttatccactatatctcagatgtcttgccttcattaggtgaaaagaatcctttaaatcagacgattcgtcaattttgctcgtatttgctgcaagaagcaaatacagttcctttagaaaatgaggaagcctattttttccgtttacaagaacctacttcttttcaaacagaaacgctccgcagcaatgagtttgtggcctttctgcaagaatcagccagcaagacagccctgatcgaaccttcgtttcactcaatccttcgaaagggtaaagtcgttatagccaaagaaaagattcagtcaatctatcaatctacaccacaactccctatgatcgagcgattgcaagcaaccaagaaacgattaataaatgagtggtagtcacaattgatcagaaatgccaaaaagaaccacttgcaagatcaagtattagcactttctgaacagcagcagcaacgatactttggtcatttgatcgaagacgactctccctccagtattcaaaagtatactgaacaattattgcgaacgaggtatcaagtcgttgatgaacaattgaaacagaatagctggatcgatgaggatcaatttttagaacactattatacggcgttcacccaacagcattatctgaaacattctactatcacgttagatgaagcagtaattcgtttattcaaccgacacctatttatcgagaaacttcctgtagcctcgctggcttttttgctgatcgatgaaatccaagattatacacccgctcagtgtacgctgttattgacactatttccccgagcagccttcaccatggttggggatgaaaatcaagcaatttttaattctgcgattgattttagagagattcaagaaatctttgaggctaacaatcaatcagtcacacgctatgacttacgaactagctaccgttccagtggtgaaattactaaattgtttgcaaagcttgccaaccatacaactatgtcgatcatgcctgttcgcccggccggagagcctccccgatttattcgttttgaaaacgagttggaatggctggcaactatcacacctttcataaaaaagggaaggcaatatacgatactgacaaagagccataaggaggctgcttttttggaagaatatctcaaaggacagacaaatcaactcccctttcctgtttattcgattgacatcgctaaaggaagagaatttgatcatgtcattctttatgacgtttcaaacgaacaattctatacaacacaagacaagcgaatattgtatacactgctgtcccgtggcatggaaagtatgctggttacttataaaaaagaacttagtgcctttttctaatccgaaaaccattgattcttgaataaagcccagaatcaaactactgccagatccagcacttaacaactaagtttttttagaaaaaagtacctttttgtctatttgagcaaatgcatctgcccaggcttaggataaatgaagtttcactttatttaccctaagcctttttgacttgtcccttcaacctccgactcttcttcgttgatccgcatccctttgtgataatcttacttgtcttcttctatgatcttaaaaacgtagatgcaaagatttcccatgggatgagaactagacggaataatttcgtcacaacatttgtccaataattgaaattgcagcggtcgtcaaccctggaagctcgtgtcagttgctccaattcaattgttttattcaagcgcggaaggcttttttacataaattttcacaacagtagagcattgaagcccaactgtcagttggaatagttggagcagcgtccgctatttgcagatacaaaaaaaccactaatgacgaatcattagtggttaaatctattgattaacgatgaatgtaagtataaccagatgcattcattgttgctatgtttggtcctgtaggtgaagggaagcccattccaccttgagagatcgtaatggtgttgcttgcaggatcataagattctacataggctacgtgtccatacgtaccatctgctgtccactctccgccaacggattggcctgcggcaaagacaacaactgctccagcggctggtgttccattcactgtgtatccatcagctgctgctgaggcaccccattgggcaccatttccccagtaagtaccaacccatggtgcgcgatttttaacataccatgtacattgtcctactgcatacatgttacctgatgatgagtggtctttaccactaccaccggtattgactgtagaattattgctgttatttgtatttgatgaagaactgtttgatgaatttgaactattacttgatgaacttgagctgcttgatgatccagcagttgctgtttcaacaacagaagtatctgaagaactttctgtcttcgttgtacttgtttgaacatcttctgtaacagctgctttttcttgtgcttctttcaatgctgctgcctgttttgcttcttctgcttttttagcagccgctgcttcttgttgagctttcaagacacgtgctttttcagcttccgcttcttgttttttcttgttcaacgcatctttgtctttttcagctgttgcttgttcagcagctaaattagctttcaacacattcaagtctgcttgttttgtagccaatgcatctttttgattttgcagctcagcttgagttgctgctacttcttgaattttgctttcattttcttttactttttgttcaacatcttctttgtcgcgtttttgctgctcaactagatcattgttggcatttacgattgttgtcatggcttgtactcgaccaataacatccgtcaaagaatctgcttctagaactgcatcgataaagtttgtgctttgaccatttacttgcacatcgcgtgcttgttttttgatggcttcttcacgttttgcgatacgtaattttaaagtggcaattttatcttgtaatttttctgcttctttacctagtgcaacttgtttagcttctaagtcactgacttttgcactcactgaatcaatttctgcttctagagaatcgatttgtgattgagcatctgcttgttgtccttttagggaatcgattttttgattttgttgttcgatttgatcatcaatggaatctgctgatactaatcctggtcctgcaactgctgttaatgttagagaacacaccattaatgctgataacaaacttttcttcactcgtttttcctccgactagcgctttttgtgtaaattagttgtcttaataaaaaatttacttaatataagaaaatttaaagttcgatttaacgacaaatgaattctaacataagcatatgacatacagataaaagaaatgttacaaaaatgtttcaaagacaattctcatcagaaatattcttctatgctagctataaagcttgataaaacagcatttttaaaatgtttttcaaaaaaagaaatcgataaaaaagcgcttttttatttttcaggtagtccaaaaactcctgaaaaaaccaaaaaatttgcttttttacagtgtgaatccccttttttctctcttttggccctctctttatccgtttcttttttcattaaagaagataccgtgtaagcaaaatacttgatcctttctaagtgacaagcaagttttctcttcctataataggaagaataccgctcgaaaggaggaagcatcatttccaaaagaaaaataattatctggatcagtagcattttggtttgcggcttacttttgcttgctctttggacgaccaaaaaagcgaacagtgtgttgcagcaagattcagaaagcgaattttggctgctaagcgatgttcatttcctgtcgtcagcacttcacgataatagtatagccttcaaccagtttgctgaaggtgccgctggtaaagaaatgcgctatcaggcagaaagtttggaagcttttgttgctgaagccctagaaaaacgaccaacaggagtgatcttgacaggggacatgacattgaatggagagaaagcaagtgcagaatctcttgccgagttattggcaccattacaagaagcttcgatcatggtactgagtttgcccggcaatcatgagatttacaatggttgggccagaatttttgatggggataaggaattttatgccgatcaaatcagcccgcaagatttcaaagatattttttccgaaggctacgagaaagctgacagtgttgatcggacctcattaagctatagcatcaatctcaatgatcagtatcgcttagtattacttgattcatgtatttatgaagaacaagtgaattggaaccagccaactacgaatggccgcttgaaagaaagcaccttagaatggctgaaggatcaactagaagcagctaaacaacagcagcagacaccgcttctcttcatgcaccataatcttctggaacataattcattgttgaaagaaggttatattttagataactcggcgcaattgcagcaattactaactgcttatcaggtaccagcgattttttctggacacatccatatccaagatattacagaaggaccctctggtattcaggaaattgtcaccggctcttattccacacaagaacttggctatggggtcgtaacacttactgatgaaacgatcaactacgaaaaaaaggtgattgatttggaccaatgggctgctaagaacaagcggaaagatcctcaccttttgcagtatagcaactatcaagcaaccatctttcaacaagatacaactaaaatggtgcgccaacagctcgcatctgttactgaattgacagaagaacaaatcaacacattatatacatttattgcaaagatgaatgcagcgttatttactggtgacgacgtttattcgcaagaagaaaaagaaacgattcgacattctgaagaataccagctgctggcaacatattcttattttctaaaacaatatgttgactcgctattggaagataagagtccagataatgcgctgacacttcccataaaatgaacgatagccttcctgtcataagacgggaaggctatctaacgatgcaatatttattctttgaaagttgaagcagactattactactattatttatttctcatttaaacgatgcaatccctaacctctactgcatccttgtaactctgaagttacgccagttttgaataaatttcctaaaaacaagataacgttggtacaaaaatatttctcgtattcaatcagtataacacattttggcaaaaatgtcgtcaacagacttcctctctccattcttgtgtagatttagcttggtattctttccttaacaggcaacatcacttcaaaaatctgctgttctttttgatccgtggatacatcatcttgccacatcagttcccagatatctccatctatctgtaaattagctgattccagataggctttgaatcgttttgtaaaatcttttaaatgatgtatctcccctctgacgaatcccgacacataatttcctgctggtctacaaataattgcttgatccgagtaaagaggcagtcgttctttgggaatcatcactaatgcacggtaaggcgcttcatggatcgactcttgatcgaatgcagatccttctactaaataaccgatggggtagccactaaataaatccttgtaatctaaataaggataaaaacgtgaaaaagcctgaaagaccgaagtctcatcatactcattgatttcttcagaaacagcaaaatatacttctgaccgataactataagtcatattggtaaaatcggctgtctgtactttttcaaatcgcgaaatgaaccgatccaaaacggctttatgttcctctagttccgttattttctgatctacttctttacgacggatgatcaactctttttgcatcgtctcaggattgcggtttcttagaaatgtttggatttcctctaaggacatatccaatgctcgcaagaccaaaatcacatctaattccgcacactgttcaaatccgtaataacgatacccgttttcaccgatctgtttaggtttgaacagcccgatttgatcataataaagcagtgtacgacgactaacaccgccataagccgcaagttcactgatggtcaaaaattttttcaaaaaaaatgcctccctcctattgactgttacgttacgttacagtttattctagcacagaacgacgtaattggagggaatttttatgaaacaattaaaacaattttttttcaccgaaaaacgcctatttctaggtacttttttatttatgctgatccattctttcgggacactttttcttccctattttgtagccaagatcattgatgatggcattttaaaacaagatcaatcagctatcatccgctatgggggctggatgctggctgttgcactaggaactggtgtgattgctgtcagtgctagttatttttctgcccatctagcagggaaattcggacatcatcttcggatcaaactattcaacaaaatacaggagcttgcgatctctagttttgaaaaatatggtacaccaaccttgcttgcaagaacaacgaatgacatcaataacattcaacaaatcttgatgatggctttacaaatgattcttcccgctccactgatcattttggcttcgattattttaacaggtagtgtatcttggcgaatggtgtggatccctattgcagcgattgcttgtttctcgatcgtcgcacttttcgtcatttatcaagcaatccctttggcaaagaaaacgcagaaaaaagtagatactatgatgcggattttgcgtgaaacctatacaggcgtacgggtgattcgcgcctttgacaaagctagtttcgaaaaaaagcggacagaccaaacctttgaagggtacgcaaaagtgatgatccaagtcaatcgtttattcgctgttttgaatccagccgtacactttttcatggggctgtccattctaagcattttgggattcggcggtttccaaagtctctcaggaaacctgcccatcggcagtatcactgcgatcatcgaatataccgttttgagcctttggtttttgaccatggcagcaatggtgatcgtcatgatcccaaaaggattgacatccttgcagcggattgaagaagttttgtctgaagaagaaacgatgacagacggtccacagccaatcttgccaaaagaaagctcattagtagctgcctttcatcatgtctccttcacctatgctggggcagaggaacccgtactggaagatattgattttgagatccatcgcggacagaccactgcgattgttggcggcaccggatcaggaaaaagtacgatcgccaaagcacttttgcggttaaaagacgtttctaacggctcaatcacattatatgatcgtgatattcgagaagtctcacaggtcgcactacgatcatttatcagctatgttcctcaaaaagcattgttgatcagtggatcgatctgggacacattgactttcgggattgtcaatcccgatccgcaacaagtagcacaggccgtcaaaatcgcgcaagcagagtcgtttatcaaaagtctacccgatgggatcgacagtcacgttgctcaaaagggcagcaatttttctggcggccaaaaacaacgcttgagtatagcgcgcgcattagtgaagcccgctcacatttacttttttgatgacagtttttcggcgcttgactatcaaacagatgcaaatttacggcgagcattaaaatcttatgtccgtgattcagccgtagtaatcgtggctcagcgtgttgcaactgtcatggatgctgatcaaatcatcgttcttgatgaaggaaaaatcgtcggaaaagggacccattcagaactgatggaaacctgtagcacctatcaagaatttgcggcttcgcaaggaataggaggagaaaaaaatgagcaaaaaaataactgatgcaccaaaaaatttaaaacatacgagcatgcggctcttacaattattattccagcaaaaaagccgcttcggactgattttgatttctgctctctgctacgcgacacttatgacaatcgcaccattactgttgggtcaaggattggataatctcatcactttgcttcagcaaggaggctggcaaccaagtgaattcttgcaagtcatcaaatggccactgctccttctagggatctcctggctgatgattagtctattttcatttttacaagaatacacaatggcaagtgtcagcgaaacattgaccttaaccctcagaaaagaattgacgcacaagtttaatcggttgccggtacgattttacgatacgcatcagacaggcgatattttaagccgagcaattctagacctggataaagtctctgaagtccttcaagtcggattgatgcaactcattacagccactctcagtatcttatttggtcttggtgtgatgttttggctcagtccattattaactgtagggattatcattatcctactgataagtgctttcgctacccatcgactggctcagcgaaatttggtttacttttcagaaaatcagacaacattgggagcagtcggtagccgggcagaagagttttatactgcccatttattgatcaaatcctacaatcagcaatctgctgtcgcttcagaaatgcacgaattaagtgaaaagcaatttcatgcttttcgtaaagcacaatttgctagctatgcgatcaatccgttcattcgctttatcaaccaaatcgggtttgtcgtaagtgctgtgattggtggaatgatggtaatcaatggacagttatccatcgggttgatccaagcctacttgcaatataccaatcaagtttccgaaccgatcacacaagcttcttatattattaatacgttacaaagtgcattagcgtcattggaacggatctttgagattttggattatccagaagaaaaagaaacccaacaccctcttgcagtcccagaagaattgtcggggagaatcgattttgaagatgtttctttcggttattctccagataaattattgatgcaacatgtgaacctacaagttgcacctagacagacagtagccatcgtggggcctactggggccggcaagacaactttgatcaacttgctgatgcgcttctatccactgaatggaggcaagatccggatcgatcgctacaatatgacggatttttcagccacagacattcgcaaaaaatttgggatggttttacaagacacatggttgtttgaaggaacgattgcagagaatattgcttacggcaaaaaagatgcaacgaaagaggcaatcattgccgccgcaaaagcagcacaatgcgatcattttattcggatactgccgaagggctacgagacgatcataggatccgaaaccgaactatcacaaggtcagcaacaacttttgacgattgctcgtgcaattttggcagatccagctattttgattctggacgaagcgacttccagtgttgatacccgaaccgaacaaatgatccaaacagcaatggacacattgacgaaaaatcgaacaagctttgtcattgcccatcgcctctccacgatcaagaatgctgatttgatccttgtgatggaagcaggacaaatcattgagcaaggcaaacatgaggaactgttagcaaaaccttcattatacgcccaactctacaatagtcagtttgccagaaattgattagaatttttgtcacgtttcatctagagatcaaaaagcaaaggccatcgccaacaaaaaagactgcgtctagtatacagacgcagtctttttttgagattcattgactcattccttcatttttccttggagatcaccaggtcaagaaagtaatttccggaaatgaattttttactttaaagcaaaaaaagaagaccattgccggtcttcttttaaaagttgttattatgctttaacgatgtttgttgcttgtaagccacgttggccttcttcaacgtcgaaagtcactgcttgaccttcatctaaagttttgaagccgtcgccttggatagctgaaaagtgtgcaaatacatcattgccatcttcacctgtaataaatccaaaacctttatctgcattaaaccattttactgtaccgttattcataaacgtatacctccatattacacatcgtgtgtgtttatttttgtaatagaaaatgatgtgtaattgaagtgtgtatcaaaagataaacaagtattaacatatcagaactttacttttatagaataccatgccagaagaaaaatagcaatgataatgccgcttttctttttcgatactcgtaaaaccttaagttttccttggcaacaacttttctaatcctgtctctagctcttttaccaccttattcctttcacatatcctttgcgctttgtagaatatttgtagaacacgcgacgcttttgcgtacataagaacatgtaaaatagcgaattctaagacagtgctatctaggctattgtttcaagtacaagattcaacgccaatcgatacttgcctcttgcagaaacatgcaccgaacaattcttttattttatcaaacttgtctctggaaactttaaggaaatttttagccttctttttattctagttctatttaaaattatttaaaagtaaaattatttaaaagttagtagagaaaatccccaatgactcgctgaaacgtaaattgattcatagatgtccttctcattcctgtaaagataatttccattaaagctgcctttctcataaatttttctttcttgaaactggattatgatattttcagtaagaattgcttgatatttattaaatttctcctcatttatgttttttgtttcacaaactaaacccctctatggtataatcattttgtttttaagaaaactatgggcatacaaaggagaaggtaacatgaaaaaaacaaaaatcactttaatcgctgcttcattgctaatgggaggaactcttctagctgcatgtagttctgataacaatacaactgcaagttcatcaactgctgcttcaactgcaacaactgcatcaacagatgatgttgtttcaacagcttcagtaagtgaccaaacttcagtcattgaaaaagcattgagcgcagacggtaactggatcgttgctgttacagacaacatgactttcgacaaagatttgacagttgacggcgaattccatgacaaaggggacgctgcaaatgatatctaccgtaaatttgcattgtactctcaagatgaaaaccgtacagtaactgctgaatacactgtaactgttcctaaattagttgttaactcagaaaacttcaacatcgttaacggtgtagtgaaaggcgacatcgaagtaaatgcaaaaggcttcgtattgaacggcactaaagttgaaggaaacatcacgttcgcttctaaagaaattcaagattcagcaagacttgataaagaaggcgcatctgttacaggtgacgtgaaagtcagcgaataattttttactgttttctttgtgaaaaacactttcgaaaaaggaaccttggatttgattttattcatctccaaggttttttctgtgtttttttattctctgttttatcgttgttcccactaactttgtgtaagtagctacaaagattttctgataatctaaaaaattcctcccatcgtttttcactctgacgcacacttgccaaaaatgtttgacgataagaggattttttacttcttgccgattaactgcttaattcaatgctactcactcttcaatagaagcccatttgtaatcatattgcgcacctgcaccatgagaaacgactcctttgacttttggcgcccgcaaatgggcttccacgttttggtaaacaggaatgacaccttgttctgccataatgattttttctgcttctagtagatcttgccaacgagcttcaggatctcccgcatgggttgaagcagcggcattcactgctgcatcataatctggattactccaacgaccacggttataggaatttccagtaacaaacagatctgtaaagctgctggcatctgcatagtcggccccccatccgcccattacaacatcaaagtctccgttgttggaacgatctagccgaacagaaaaaggtaccggactcaagctgactttcacaccatccaatgtactttcgattgcactttggacatactcgatcgcttttttagtcgagtcggtatcagaagccaagatttcaaaatctaatgaatcgattcctaaagctgctttggctttttcccagtgttctttcgctttgtcttcattgtattcgatcacactgccagcatcttcaacaaaatctttgttatccgtcgggctgaaagtcataccttctggaatcaatcctgtcgaagctagagatccgtcccccagaatggaggatacaagtgcatcacgatcgattgcataagaaattgcttttcgcaaatcttcattacggaatggagaattttcttctcgctgattcaattcgatataagaggtccgggccaaaggctctgaaacaaaagcttcatcatttgccatttgctgcgccaattctcctgttaagatcacatcgtctgcttgaccatcttggaatagattcaacgatgtcgcagattctttgacaacactgacattgatggtttgtaatttaacattttcttggtcccaatactgatcattcttttcgtaggaccattccgtatctgtacccggtccatcaaatcctgtcaaaacaaatgggccattgtacacagaattatcactggtcgttgcatattgatcgcctttttcttccacaattccttgattttgcgggaagaaagatgggaaagcgagtaaataatcaaaatagggggttgctttttctaaagtaatctctaattcgtactcactgactgctttgatccctaactcgctaggatctgtttttcctgcagtgatcgattcagcattcttgactggggcaaacaaataagcgtattctgaacctgtttcggcttttactgtccgttgccagccgtaaacataatccgcagctgttacaggatcaccattcgaccacttagcatcttctcgcaatttcaatcggtagatcaatccatcttcactcacttctgcgagttcagcagctccagcaggttgcggcttactgtcagcatccaaacgatacaatccttcatagacattattcaatgcactgaagctgatcgtatcagttgcaagagaaagatctgcactaggcatttcttgctggacgacaacattgaagatctgttccgctgctgctgttccattcgaggaagtactttctcctgtgttactcgtgcctcctgtcgtacatccggctaataagacaccacacactgctaccaatccaaaggcccactttttcattttcctcttccccttaagttcataattttcagaattttctgaagtttaatttgattttaatcaataattatgataattgcaagagtttttcgctcgtttttttcaaaaaagattaaaaaaaaaatctttttttcataaataattaatctacaacctttatgttctctttcaaacaagaaaaaactgtgatacgcaagagcatcctatcagctccttacgtatcacagtcaaacaattatcaagcttccattttgtagctttctctactattcttacgatctcttatcacactaagaatcgtagggatcgcaccaattgcagtaaacagatagacaagagctaggttcccatagtattgactagcttccaaataaccttctcttagcaagtcaggcaatatccgaaatgcatagaaataatcaacatcggtataataattggctacactgatagaccaatcaatccgattgcctagataaaccatgatgaccataatcaaaacactaccgatgatgcctttgttgctcagctttccgccaagaagttcatacccttttaaagcacagacagccattgcaatacctgataatgccgctacataacctaattggccaagtaaaataatgacaccgaccccaatcagtgaacctataaatgcaccaactatcccagccagccagttttctttcttctgattctgctcatgcaggctagcaagcatcgcttcattttgctttttgaaacaagcactgcaagcgatcactggcagcccacctatgctgtaggtatctatcggcgcttccgatgttccgcaaaactgacagactgtttgatagtgattttctttaagaaaatcagtgactgtatctagaccagcaaccaatttttctttggttttggcaacagtcattgcccctcggaatgtataagtgacttggtaaccttgtacagagcagtccaatatgtctttggaatcagtcactacttgtctcacttgctctgagctaggtagttcttggtttttgctgatcgaaaaagttgctgcgaaagaataactattattattcaattgtgtcaatataactttatacgaacgatacgtaccgtaaatcacacccatttttggatctaccgacaaccccaacgtctccgcaaaactagataatgtttttacgagcttcttattcatttgtcctccttataaacgatagattataacaaacgttataactttgagtgtaaaatagaggccaaaatcgtgtcaaaagatacgtttgtgtattttgtaacacgatttgttttctttaagcgattcccgatattaccatctgctggccttcaggaagtgatcgataagacaaatttctgaagagcagctgcaactccactgtctttatttgaaagtgtaacggcatccgcctgttccctgactcttcgtggtgcattggccattgcgacccctactccagcttttagtatcataggtaaatcattgaagttatctcctattgccaacgtttgcgctagaggcacgttgtaataagaagccagttccatcaatgctttttcttttgaaacttctcgatgcgtgacttctaggtaattatcttttgaaaggtaaagagcgctcgtcttcaaagattgcttttcccagtaaccttttactttttggatctcagcagacgtaccgatcaaaagtaatttatgaacgggtatttgcaaggactgtactaaggccaataaatctgcctcctgcgctacctcctgcgtgattgcggcttctttttttacccattcatcaagacgatccacataccaaactgtatctgaataaagattgatagaaacttgtgagaagtgtgttcttgtctcgctgatgattcgcacaacttctttgatggcaacttcatgacttgagataggcggagcagaaagatttccgtttgccagaactaacgcgccattgtaacaagccaaaggatactcgctgattcctaacgcttcagctaagtgctgcatcccttttggtgatcgtgcagacgctaagacaaaaggaattttactttcttttaatcgttgcagcacctgttgtaagtttgggtcaatctgatgggtatcatctaaaatcgttccatcaatgtcgcttacgattaatttgatttctctcgtattcatttgtgcctcctaactttagctatgactttcattcgactatcttcatcctcaaattcgcctaaggatgaatccaattagcgtgattttttgattcgtaatgcttgattcttcgctaaataaaatggacgcaaataagcgactgtgtttgataaaagtagaacatcgggagatagttggatgttcaagtagttttcgagatattctttgcgtttcgtgatacgttcccacagttctggataatcggcttttaattcttgtcgcagttcttgatcagctaatgcaatacattcttccgcactgacaccagtatactcaggaacagatggaatgatatctacttggaacatcatgccgctttctaaaggtgtaagagagtccgcgtagattggtgaagacatccactcatcatccgaaaccagatgtccaggattcaagtgccagtgataactcttttttggcagaacttcttcaatcaatcgatacatctcgccacccgtttggttgattcgaattgcttccaaccaagtggtgatcgcctggtaatacggtttcacgacacgttcaaggtaatcttgttgttcagccggcaattgacttgcttctgagacgacaaatcccgtgcgactggagagtcctcctttataaccaatcgtcattgagaaaggatcacccaaagcaattcgtttgtgcgttggataaagattggcaaattcaaatcgtttaccgctagcagcgattggcaccacagaaggcatttgtccctctgccaacaaatatgccccaatttcggcttcttttttgccaacttcaatcgcattcatcgcactcaaaatacaacgagaagaaaggttagccccatattcataatgagcgatttcattggcattgttgtgactacggcttcctttttcaccaatcagcaaataagcagcatttaccacatgacatgtccttgtgactgcccgtttgactgcatctacgataaaataaggaacatcaaagagtgtggctggatcttcgtgatgcgtcgtgaacatcttccacccaatgatgccaatttttttcttctctttaaaccttaaagaagaaaaaacagaggatagtgatttttctcctgtcataggctgattcggcagcgaaaactgcgggtaatggactagctctgccgctatgcgggaatgagcctgcagctttaaattttcatttcccaaaatgagtgttgcggcgccagttttatctagaaccaatagtccttcctcgaatcttggcaggaatcctgacagatattcaaagttgctgccatgttctttgtctgcatagatcaccaacgtgtcaaactcttcagcagccattcgctctaagacacttagtttgcgctgactcatggtcgcatcacttaaaaaaactggagcgacctcttcaaaaataggtggttctggtaaaatggctaattcaatcgcttttttcatgattaagactccttctgatttactctgttacataaatggtcacattcgctgcggcaagtgctgcttgtaactcgatgtctggttgttgatcggtgattaaaagatcgatctccggcagatcacagactttaaaaaaaccagtcgttgctaactttgtatggtcagctactgcaatgacatactctccttgtttcaccatctgacgcttgaccatgccttcttcttccgtatggataaatacgccttctgtagaaagggcaaatactcctaacagtgtgtaatctgcctgaaattgggcaagtttggcaacagtatccgcaccatataaaaataattgttctttgtctaatcttccaggcaaaaccgtaatcgtactctgttttagcgctgccaatcgttgggcatgagtcaatgaattagtaatcgcttgaagaggataatctgacagttcattgatcaccgcttctacagttgtcgatgcatcaaaaataatcgcagctggctgtttgatccaatgaatagctgctttagcaatttttgcttttatgtcataaaattgcccggcgcgagtttgataatcataaatcacggctgcagggttcgtcgaaaccgcccctccgtgggttcgtttaagtacttgccgtttttctaattgaatcagatcacgacgaatcgtatcttttgatacggataacaacttggacaatcgttcaatcgaagcactttgctcaactgctagcacttcttggattttagctaggcgctgttccacaaacatctctctgtcattcctttccactaaaaaatacaatgcaaaaaattgctaaacaatgcaaaaagatgcaaacgatcttaaaaaaactacctccaacaaacatgttgcaggtagttttgtcgtcattgttcttcttattttacacgaagcgcaaagctggctgttgaaaaacctgaacttgcttcggtaaccgtgtacccagtgcttggtgcatgaatgaagctgccgttaccagttgcaattgcaacatgatacgtattgcctttttcaccccagaatagaagatctcctgcttgggcttgagatacagggatgatcgtaccggcactttcttgcggaacggtccaatcgccaatatttttccctgttacttgtaaaaagacataacgagtgaaaccggaacagtcaaagacatctggccctttccctccccattggtagggtgtcccgatatatttacgggcttcagctacaatagcagcaccgttaatattcgtaccgatagtattgttgccagaattgccaggatttgttgtggtatttccactgacttcttttacgtaagctgccgtgatccagccaccgctagataacttataccacgtcgtattaccattgacagaagtcccttttttctgcgccactgctttcactacagcgttgctgctcaaactgctgacaatactggcagtagttgaagcgttcgaacgaacattcatcccagtcgtagtctgtagatttttactgattgcttgttcggcagaattatttgatgaattagaattattgctgcttgatccaccggttgatggactgctcgtattgctcgcatctttgacataagctgccgtgatccaaccacctgtagataatttgtaccatgtcttattgccgttgacggatgaacctgatttttgagcgacaactttaacggtcgtgctattgttcagacttcccacaacactaccacttgttgatgcactggaacgtacattcaatgaagcggtggtcttgacatttttgctgattgcttgttctgtagttgatgtgtttccaggattgcttgtcgttgaaccgctagacacagcctgaacataagctgcggtaatccagccaccattagacaatttgtaccatgttgttgtaccattcacggaagttcctgatttttgagcaaccacaatgaccgtggcattgctgctcaatccccgaacgacactcgcactggttgatgcactagaccgtacattcagtgctgctgttgttttgacggtcttattgacagctgtttctccgctagtactgttgttggaagagttgctgttgctggcggttgttacataagcgccagagatccagcccccagatgacaacttgtaccacgttgtgttcccattgacggaagttcctgatttttgagcaacagctttgatcgtggtattgttccccacaccgttgataattctcgcactggttgaagcgtctgaacgcacattcagtgaagcggtcgttttaaattgtcgattgatcgttgtttctgacgatcgagcaagagttgtcgttgcagttgatttagttgactttgctacttctgtttcatttactcctgtagcgttggcctctggtgcgttgaccaaagttgtgaatacacctgatgtagaagctaacaccgttgtaacccctatacttttttgaataaaaagtgatcgtttttgtttcactaaacgcttacggattgcttttcgagattccaatgaaacaccccccccttttcattctatcaaaatcgattgatttttaacatcttttttctgtctgtaacatttatttaatgtaggtttattccttggcaccgaaaaattttctttctaaacccacgttttacctatacaaacgatacaaatacaattctattttaaatgaaaaaaatatagaacgctatcaaaacgaatgaacccgactgtttttttggaaactagagtagctcctatcaaataaacaaggtaggccaattttcttcaataatcctgccatctactcgacatttatttgcaatctagtccttttttcttcacaaatactattttaaaaagcgttaaagctttaaaaacaaaagagaaaccgttttaattctttgtgaaattatgctatagtaaaaaaaaggaagaggtgacttaaaatgaaaacgaaatcgaaagaaaaagtttatgccgagcgtcagcatagttataagcaagaaaaagaggaaattttcaaaaaagcccttgcttctgtatcaaaaaaagacaaaaaatccgccgctaaagacaaacgatgacccttatctgcctgcgacatttactttaggctgctttgtagcttgaaaaacatgcctgactattcaaccgatccgagtagactctcggttcggctaaataatcaggtattttttgtgtcgttaaagctttaaagatcccgtcattcctttgacaaaccctcgttgcataaagagaaaaaggactaatgtagggatcgttgcaatgacaattgctgtcatctgcacgccatagttcgcaacataagaagccgatgataagttcgatatcagcaacgtcatcgtttgacgatcttctgtctgcaaaaagatcagcgggagcaaatagctattccatgagttcataaaagcatagatagccgctgctgcataagttgagcgcatcattggaaaaacgatccgaaagaaaatcgtatactcacttgctccttcgatcctgctggcatctaaaatgccatcgggaaaggacttgaaattttgacgaaagaaaaaaatcaggaagagattattgactagcggcaaaataacggcgatatgctgatttacaagatgcaggcctgacatcatcttaaacaatgggatgactaatgcagccagtggaatcatcatgcacagtaaaaaaagcgagtaaatcatttcactgctgcgggttcgaaatttctcaaaaccaaatgccgccaatgatgtgatcagtaaactaaatagaacagtaattacagaaatcttgatcgaattccacatgatcaaggaaacattatagttagaaaatagttgctgaaggttcgtgatcagctgatttcctagtgtgagttttccagcagcaatctgattcgatgtattcgtcgctctcgcgatcatccaatagaaaggaaagatagagacgaatgccgctacgatcaaaaaaagatattttatcagtgtattcacatttcgcttcatcgctgctcctttctgcttattgtcggtcgtcttttgctaatttgaactgcgcataggataagaccgcaatgagcactaccaacgcccacgacaatgttgctgaataaccaaaatttgaggtatagacaaatgaatgattgtagatcagttgtgctgcagtcaatgtcgcatttgaagggccaccgcctgttaaattcaccacttcatcaaagagctgaatcgttccgatcgtcgatgtgattgtggtaaaaacaatcactggcttcaattgaggaataatgatcctaaagaacttctgaaagctgtttgcgccatctatatccacagcctccaacgtatcatctgaaatattttgtaatcctgctaaataaaaaatcatgttataccctgtccagcgccagcataaggcaatgatcaccgtcactttcgcccaaaaagggctatttaaccagtctaacggttgttggataattccaattgccagcaagccccgattaatgatcccaccgatctggaacatcatcttaaacaaaaccgcataagaaaccagagaggtgacacttggcagaaataaggcaagcttaaaaaaagttcgtccaactagttttggtgtattcaacacaaaagctagtaaaagtcctaaaaacaccatgattggcacttgaaaaatcaagaaaacaaaattgttgaataatgctttgtggaaaatggtatcttgaaacatccgaacgtaattgcctaaaccaacaaaaacggattgcaatccttgcatcgtatgaagagataaataaattgaataaagaattggatagatcatgaaaatactgcttaagatcattgcaaaactaataaatttccatacttctcgcctttttctcgaaggatccatcttattcactccctgctaatgcaaatcggctactcgccgacttgcattgtataattattttcggcttcttctagcatttcgtccaaactcaatgcatcatcaaaataactctgcataactcctcgaagagcatcaaccgctgcttgcgtattgttgccatagtcgacaccagggatttcagccatccaactcgaaaaatctttatagatgggcgcatcattgaaaaatgggtctttgtattgatacgcatcccctttttgagatggtaaatacgttcccactgccccattctcgaccaatatctcttgataaaattcatcattgcctgcaaattctgtcttcaagaaatccattgccagttctttatttggcgaatcgttcaaaactaaccagcttgatccgcctaggtttgaatagggggtcgccccatcaactgtctctaattgtggcagatgtgtataagcccacttgcctttttgatcctccgcggaacgaatcgttgctgaaaaccaaatggcagaattaaccgccgcgacttcaccactcgtaactgctccgattccctcaggagcaaaataatctaccggttttgctaactctttctggtcaatctcttttaggatcggcatcatttcgcggatcgctggattgtctttcaagaaaattttgccctcttcatcgaaataccacagtccggcagactgcatcgccatctgcagataatgggtcccacggttgggaatgaatgcgacaaaccatttaccggtcttttctttcacatcttcaccgatagtgacaaattgggaccaagtcaaatctttcatatcttcttcactgtagcctgcctcacttaaataatcggtgcgataatataatccggcagaaccagaatcaaatgggactgcatagattccctccttataggtagcattctctactttgtattcggcaaaatcagcaaagtcgatggtatcagataactccgcaaatttcccttcataattcgtaagataactttgtacatcataatcatccatcaaaacgatatcaggcaatccttctgatacccccgacgtgaatccagaaaccattttttgctttgtgtcctcattcgacatttcgatgacattcactttaatctcatcatgcccatccttacggtagtactcccctgctttttccataattggaatattgaaattcgtatcccaagcccagacagtcaatgtctgctcatctgaactagcaaaatctcctgattcactactctcattattactggaacaaccaacaagcaacgcaaagctcaatatactatatagaaaaatcaacctttttttcatttttctctcctcctatttgcttttcctaaaatcccagcaaaggtgcaatagaaagcgattgcaccttgcttttattatagatatcagatgaaaaaaaccaaataattgaatttctgttgataaaaatgaataaatttgagccatgatgaatggaaacaaaatatgaaagaagtgcagaacaatgagattaaaatgagaaaatgatatagtagtgctaacatacaggaggtgagcagatggtttttacgattattctaaaattattctttgggttatttggcttattgttggtggcaagactgttagggaaaaagacactgtcggaaatcacacctttcgacttgatttatactctcgttttaggcggaattttagaagagtcgatctacgatgacaacgtttcggtcttccatgtccttttcgctatcgctttgtgggcactgttgatttactttattgaagaatttgttaaaaaaaatgagacaatcaatcgctggttgaaaggcgaaccggcagtcttgattcacaatggtcagctcaatatacaagagattacccgcaatcatatcgaaatggagcagttgcgaaccatgttacggcaacaacaatgtttctcccttgcaaatgccaagtatgttgtactggaaaacgcggggcaaatcagtgttttaacacattcagaggatgagcaaacattggcaatcatgctggttgaccaaggaaatattcaatatcctgtaatgcaatcccatcatttgagcgaaacttggctacgagaagaattacagaaacaaggctattcttctttcaaaaatcttatttatgtagagtggtcccaagacaatgagttttatatcatcaccaaggcagagacgatccaggctcgctaccgaatcgatggctaaaacaatcattcgattttaagatacttttcctctttaggaagatgccatcaggaagataccatccatcaaacaactattttcgacgagtaatcacttagcaatcagcatgagcaaaaaagacttactttaaaaacgttattttttcctcactgcctcttcatagagatttctttgttttcttggaattttttcagatgaaagaagtattctactgaattagatggaggtgaagggatatagaggtaattggtggattgattttttggattcctgttttattgtttcttattatcggatcgatatttattacatggcgaaagaatgtcgttgtactactctttcttttgataccatttttgttttttttactaaacgtttttgatcatcatcattatgaacccatgtctgatttgatgtacaatcttttaggactagctctttcaacgattgctatcatcttttatttgctttttcaaagcaaaaagaaatagagtctatgccataagatcttcgacaaacggatatcccatcggtgacgatgtcccgttgtactccagtcgaatcttgtaacaaaagagcgatgattcaacgatcaatcagatgttttttatttttactaagattaaataagtgaacgaatactcactcaaataaaagatatcccaacaatgagaaatagttagcccgtcttcacgattttatcgcgagtattggctagctactcttaggcgggatatcttttttcgcttgaatcttcttatacaaagcagaactcaattttttcactagggccttagctattgctataattgcaggcaactagtccacttgttcgatagtcgttgtcccccagttcatgacatttgcaacatggacatacccatcataaagatttaacagcaaagcgattgcacagacaatataaacaagtcgataaaaagaatttgtcttcttgttgcgccaaatggcaaaaccgcttaggaggatgcctaaaggaaagatgaatgaggatacgccggctaaaagcagcaaaatcaatccttcatctttatcagaagacatttgttgggtgataaaactcaacttcttctttttatcttcaatttccacattattcttttgaatttgttctttcaattgttcattttcctgcagcaattcatcaatcgatacttgataaagtttgcttagtaaaactaaattatcaatatctggatagccacgcccattctcccacttagagatcgactgacgagaaatctttaattcttctgctacggaagcttgcgacaatccgcttttctcacgatataattttagttgttccgctaaggccactaatttcatctcctacacctattactttacaactagtttaccattagaaatggttgcggtcacgcttgcatttgttgtaatcgttccagctttttgtttaaagctgcaagtagccttagtagtcgtatgggttaatgaactcgaaagaatacttcctttcaatgctttgatgctcaaatttgtcgccgctgtgatctgttcttttgagttgatctttacattataagaagcagtccaacttcctttgactgtcttagacactttataagttccttgagcaattcgtgcaaagggttgaatatattcaacagatagtacgacttcatcacccgcttcatcaatataagatatctcttgagaaccgacgccagcggtcatttcataaacaagctcatctgtattcttttcatccgctacagctgtgacagacacccccaaaaaacctaaaaaacaggctactaaaataactaatttcttcataaaaacactcctctcttatttgttttcactttatcgcttttcttgaaatataaggagaaactataggtttacagggggaaaccattggtttacatccttcatttccctttcattgtaaacaaaaggttgcttcttttctataacaattactgtaataatggaaaagtacgatctgtggggaggtgtcagaatgaaaaggcaaaataaaatcctattattcagttttagtctgccgctttttagtgtttttttcggtccagtatctagccaacaatttggtcccttgtacgaatatgcttttggcttcccgctaagattcatctggtataggagtatcaatgaatctcttgaaagtcattgggcactcttttcctttgaaaagatcgctcacttgcaagttgatttacttggctactttcttgcagtgctgctgacttatctcgtttcccgatttttgttcgagcaactctcacaatggctgcataagcatgtgcaaagcggactattataaataaaaggaatgttttcgttaagaggataaaccctttctcaatccacaaagacaatacaacctcaagatgtcgtaggcgaaaacaagttccccctatatattgtggataaaactgttaatatgtgcataactcggtctttgacacgctgttttacgaataaaacggcccaacaagtatccttttcacagataaatgttgggctggtatcttaactcatcctcattttccagcagaccttcgcaaaaaattttttgccttgctgctaaacttatttctgttattcgtcattctcgtgctatccatcgatctctttcagtgctgctgacggcacgtcttctttggcaatttcttcatacgtctcaacatgtgcccctttattcgtcaatttcaaaaagcgctctgtcttcaacacttgtaagccttcaaattctatcattcgagtctggccatctgccgtggcagctacttgtttgtaatgagcagtgccatagccgttgaccgattcaggcgcttgcgtttttacatacatttcgctttttggaacaagtggattcaattgatctaaaattcctgccacctctcccgatgctcggttagtgtacaacatgattcccccgcacagaagtaagaaaaacaaaccaatggataagattgctcgtacgatttttttcatcatattctcctttcgtctctctttctatcttagcaaaataaaaacaggggaaatcggccttaggtcccaatccaaaataacaaaattgaaaggttgccgtaagaaaacttctacaacttattgatatttgcttaatactgcttatccagctaggcaacaaaggcaaaaaagattacaataattaaaaaaaggagtacctatatgcttacacatttcaatcttattgctattcttttggcaacacttgcttttatgatcagcgggagcttactttataatccaatccatgcttgggggcgcttttgggcaaaagaatctggcatgctaaataaagaaagtcatcatatgtctgccggcgatgtcgtttttacttttggcgggacagctgttggcggactattattggcatttacactaggacaagtcacctattggttcaataagtttgaccatgacggttggatgatgacgagcttgcaagtggcctttttgctatggctgggcgtatttgctgtggcaactttcgtaaatgcagcctatgctggacaaagcaaaaaactgattggtctgcatttattgaatggtgcaatcgagttagtcattatgggaatcatcattggcttgtttccagtggtaggttaacaagctgatacgcaatcataagcaagtgtttctcaagctatcgggggcagaaaaaaacaggtaatgtaaaccaatcagtgaaaacctgtcgtaaggtatgagtgggctagcttgtcgttttttgattattcttgggccaaaaaaagaaagaagggatcaccatcaactacctgcccaatctcttgtccattgcacggatcgcgttagctggtcttctattgatcaatcagcagcctttgttttcagtctgctacctcatttgcggattgacggatgttttagacggatttattgcacgaaactatcgattgcaaacgaccttgggctcaaaactagatagtttaggtgattttgttttttggtccattgtcctatttctttacattaaaactaagatctatccagattggatcatttatggcattgtcttagtcgctagcattcgatttcttaatttgattttgactaaagttaagtttgctcagtgggggatgctgcacacattgagcaacaagataacaggtcttgccttgtttctcctgtgtttcgtggcatttacttttggtgacgtatcaggatatatttgggtcgtgacattcctgctcgctttgttttcatctatagaggaaacactgattgtctggcgcagcacttattacgaaccgaatccaaaaggctttttcactgtttctcatcaatccagctaaattttagcaacaagagtatcaaaaaagcgtccagctgtaataagagctggacgttttttgcgtactatctattatgaatagtaatgtttatttattttttagcgtattctgaagcttggacccctgcttgacgaccaaagaccatgatatcagcaactgcatttccgccgatacggttttgtccgtgaataccaccagttacttctccagcagcgtataaaccatcaataacagaaccgtcttttttcaagacttgtgtattggtattgatttttacaccacccattgtgtggtggattcctggtgcgattttgattgcatagtaaggaccagttgttaagtcataatccattgctgtttctcgaccaaatgcttcgtcttttttatctttaacagattgattccatgtatctagtgtttttgccaatgtatcagcgtccatgtcgattttcttcgctaaggcttcgatcgtatctgcttcaacgactacaccttgttctttgtagaaatcaacttgttttgctcgacctgctaatgcatcgtcaaagatcaagtaagcatagctttctggaagagcggtaatcgccgcagaaacattgtcgcgggtttctaattcgttgtagaaacgttcaccttgttggttgactaaaatcgcaccttctccacggactgtttcactgactaacatccctgtatcttgaacaactgttgggtgaacttgaatttgatccatatcgactgttgcaccgccaagagattcaatcatcttgatgccgtcacctgtactgccttcagatgttgtgctgacatagccttttaaatccggacgatatttttcaatcatttctttgtttgagccaaagccaccagtggtaacgacaactgcattcccattgatcgttttttcttcatcaccgatttttacagaaacgccagtgacttttccgtctttttcgttgattttcttcacatcagcattcacaaacaaaggaatttccttttcatggatatttctcaatagtccatctaccaagtaggttccgacagcagagccgtcatgtggacggtggatacgtttgacacttgcaccaccactgtagctgatgttgtctaatgtgattcccatgccgtctaaccagtcaatggctgaagctgagttatcgactaagtagtgtaaaagttcttggtcattcgtacctttaccaccttttagtgtgtcatcaaagaactgttggttgctgtcttcgattccttgttctttttggaattttgtttcagaagcattcatcccaccagaagatttcaatgtgtttccgcctgcgatcggcattttttccaagatgactggattcatcccagcttctttggcagataaagcagctgccattccggcaccaccagcaccaacaatgacaatgtcatattgatcttttagttcagaaggatcggtatattcttgttcagatgcacctgaagccacttctgtttcgcttgatgatgctgaactttttgctgtttcactatcttttgtcgccccgttactaccacaagcactgagcaataataaacttgcagcgccaatgaccaatttctttaatccacttgttttcacttttttcccccaactttctttcttttgtttgattgttctttgattcttccactgaaaaagcagcgctctagcactattgattgttactttattaacaaacaagaataaaaaaatatttttactattaacaatttcaattgctttaaaatcagcgttatcatctaaaaaacaaacccaacatatttatataaacataataaaaatagaaaataataaaatcacgcttatattttgtgtaatttttcattagttgttctaatcgaaatttcatttactgtgtatatgtccccattgatcagcggtgcatacatagaaatatatacacaccgcaggcaaaaccttaggaatttttctttgattgcttctggtcaaaatttatttgattgcttctattctttacttgccaactgctagttgcttttttggaacgataattttctacatctttattacacagaaatatccttagcgctttcatgattttcgaaaacggcactgactacttgttgcgaaaaaacaatcacattctcctgcaagatgtgttctcttctgatggattcgattttctttgtcagacgttcaatctctaaactgtcgatcgctccactcatgtagattgccgaacgattctggtaggtgtttgagataatgatgtctggctcttcaactagtgattccgcagcaataaaatcaatattataaagagcggagaagatctttttcagctgcataatgaagaactgttcaaatgagaaaggaaaatctgtttctacagaaacaatgatctttttctcaaataaagtaggtgtgatcagagccgtgtaggcaagaacatatcgtaagagcagaaactcctgtttttctgtaagttgccctgttgtgctgccaaaacaaatggtacgtattttattcacaagcactgggtagtagtgtctgtaatagcggatgatatctgaatcggaacctacttccaggaatccttcaaaagcgtcataaaaagaatgcaccgccaataaaatgccgaagacatttttctcatttccgccatttaacggcaatgtcaatttttctgagagactgactgcttctaaatacacctctgctttttctctttcccaaaaatcgatgatttgcttataggtcgcctttttagcgtaaaactgcgtggaagtttgcatcatcaaaaatagaaaataaatgctttcatctctaaaaaagctatactgaaagaaagaatctttgatattttgaaactctttttcaaatagatcttgagtcatattgatcgaccattgaggcatttcctccattttcaagcggttgccttttttatctctgaggatgttgatcgcaatcaagtagcaccatttatccacgatcgattgcttcagttgaaaatcaaaattaggtaagattcgctgaacgaataattctctgatatgagcataattcaattcggggtagggccactgaccgcctttacaaatcgtccaaaaaaaggaatgaccaaagtaacgaatttggctttcggacccttcaatcacgattcgtctatttttggtgcctatctttaattcaaagcgttgcagactacggttgatgcaaagaaatttttttcttaggtttgaaaggcttatgtaattcaattcacaaaactcttcaatcttaattctttttgacaatagacagttctcgatcacttgatatatgactgactgattataaatttcatgttgtatatcaaaataaatgtttttattgccactaaaagagcaccctaatgcttttttgattttgattgcttgcggattgattttttgcaattcattaagaatactatccgttgtttttcgattcacattcagtctttctgataaattaacgattgttacaaaactatttgactgataaatataacgcaagcaattgaccattaattgggttcgcttttcaaaaagatcctgaataatcatgtcttcctcctgcattaaatagaagttcgttcataagttgctttctttcatactcatataaactgacaaaacgattaaatatatatattaatttttaatctaattttaaacatttgtcgaataagtcgctcattcttcatctgttctatgtagtgcgactcaacaaaggaagaacgctcaactttttactgttataaaaaaaggcatctgactgccttctctgaccttaattctgtaattgatcctccctactacttaagtgcttcctttcagccatcaatttttaatgagaatttaactccactaactaaaaattataaagttaatctgtatcttgagaaacccaatttgggaaaatgaactcacttttttttacattgtcactagaaatgttttggcaggaactcctataaatgcaggaaaattattgttaataaagacctttttatcgctgctttcggttagccatttactgacgataattatccatgtgatgcttttatactttttcaggaaaaacaaatccccctattttatcttacacaagcaaaagagaccttcgagaatagccaaaggtctcttgagaaaattattgttgatgtttctggactcatcctatacgaacgttcttgcgagcggtatatattttaagatgatttgcttcgtgttttttttaatgctttaaataaggtgtgatattggcctttaaaggacatggcttgttcaaaaatatcttcgccgtcattcagcatcttaacagtaacccaacctaaagattcagtaatagcactggctacccccgcgttaatggacgcgccggcgatcgtaccgacccccggtacgaacttgataatattccccacagcgcttctacctaaactaacaacaactaattctttagaaatgctttttgcgattccctcgacccacgattgaccaaacaacttgtgtagtctagccatcatcgtcatttgaacaggtacaaggagtatcgcatctgaaaacggaataggtgaacaaccaatgatggccgccgtcagagaagcggcatggatgattcgatgcgctttcttcttcgtagcatcatccacacccattaaaaattcagagaagacggcatcaaattgggtacggctttttgcttggatcttttctgccgtatgttttgacttctcaaaagatcgacgaatgatccctgccgttttgtttggtagtttggttaaaacttctgcaaagaatgactgaaactcttcttgttctgccgattctttcactggttcatccacttgttgcagcaaaatctctttttgagattttttatttttgggagtgtttctctttaatttcataaaaaccacctttaatgattagttgtcatagatttagttgctttctcaacctcttattttcatcatacactaacaaacaaaaatcacctaaagccgcgctccaggtgttataattcttaacggaagcacaagaaatcaacttctttctaacaaaaaagctcacattaccgatccaacgataccccctttaaacgagagtctctcccgtggtataatgactacttgtttcttgggtattatgaaagtgtcataacctctattcagagaagcgtgtctaatcgagcgtgttttattcatataggcagcagctgctgccaatccccacaacaaatcatcaattgataaggagaaaacaaatcaatgacctatgcacttgaaataaaagatctaaaaaaagtctatgcgaccggcgtcgaagcattacgcggtatcaacttgacagttgaagaaggtgacttctatgcgcttttagggccgaacggtgctggcaaatcaacaaccatcgggatcattacttcactagtaaacaaatcttctggcagtgtcaaagttttcggttatgatttggacaaagaattggttcaagtcaagcaacaaatcggcttagttccacaagaattcaatttcaatcctttcgaaacagtacagcaaatcgtcgtcaatcaagcgggctactacggcgttcctcgcaaagaagcgatcgctcgtagcgaaaaatacctaaagcaatccaatttatgggagaaacgcgatgttcgggccagaatgctttcgggaggaatgaagcgccgtttgatgattgcacgggctctgatgcacgagccgcgactcttaatcctcgatgaaccaacagctggcgtagatatcgaactgcgccgagaaatgtgggccttcttgcaaaaattaaataaaaatggtacgacgattattctaaccactcactatttagaggaagcagaaatgctctgccgcaacatcggaatcattcaatccggtgaattgatcgaagataccagcatgaagacccttttgtccaaattacagtttgagacattcctctttgacttagatacctatgtgaaaccacctgtgatctccggctataaaagtgcttttgaagatgatcaaacgttagcagtcgagattgagcgcaatcaaggcgttaatgatttgtttgagcaatttactaagcaaggaatcaaagttctttccatgcgcaacaaatcgaatcgtttagaggaactctttttgaaattaaccgaagaaaagcatgaagcgggggaaaaaaatgtttagtctttattttacagcattaaaaagtctagcggtcaaagaaaccaaccgctatttacggatttgggtccaaacactcgtaccaccagtgataacgacttcgttgtactttattatttttgggaaaatgattggcggccgtattggcgaaatgggcggcttctcctacatggaatttatcgttcccgggctgatcatgatgtcaacgatcaccagttcttacgcgaacgtttcgtcttctttcttttctcagaagtttcaaaagaatattgaggaacttttagttgcacccgtacctactcatgtgattatttggggatttgttttcggtggtttgggcagaagtattttagttggtatgctggtcacagtgatttctctcttttttgttcctttgcatgttttttcttgggtaatggttattctgacattagtgatgaccgcaattcttttctcactagctggtttgctaaatggtatctttgcccaatcatttgacgatgtatcgatcgtgccaacgtttgtcctacagccactgacttatttaggaggcgtcttctattccatttcgatgctgccaccaatttggcaagctatttctaaagtgaatccaatcgtctatatgatctctggattccgttatggctttttgggcacaactgatgtgccgattttagtctctgttctgattctagttttattcataattgttttgtacggtatctgttggaaattaattgaaaaaggccgcggtctacgcagctaagaaactgacggctatctttcaataaaaacaggaaggctgtgccaagaactaagagagttcttggcacagcctttttctaattctttttgccttgtctttcgggactgacccaaacaccgctgccgtgtcccaaaattgttttgaccgctagtatgaaggtcgtaacgatcgttaaagcattgaccatccaataaatcagcatataaaatggtgcaaaaatgaaatacttgatttttctgccagcatcgtccaccaataaactagtcaacaactgcatgatcccagcaaccatttcaaaacaaacgaataggaaggccattgtcaccatatgatacattcgttcaatgtttccttcgaatgcaaaacgaagaaaagaaaagatgaacagtgctgaagagatccaaaagaagatcgaccaaataatactcaatgtttgatccacaaacatgacggaccgaccaatattttgaaatggatgagtgaatacttttttgaaatttgtcagccagacttctgtaccgcctttttccaacgtttccgttggcgataaagcatcttcatggtctcaggaacttccatgaaaaacatgatccgcggagcaaacaaggacaaccagccttggaattggtgatcccaggcaatactgatatcctcggtggcacgattttggcggaagagtcccacatcgatcaaagcattttttcgatacatcgtgttggcaccgctgtatgcatagataacacctagcacgccttgttgcgtccgcttgataatacctacgatacttgaaaattcaacagtttgtgacttactgacaatcgtcgttcgattctgaacgtccatgtttgcagtgatcgctgaaatatttaccgcatcttggcgaataaagtaattgacatatttccagagtgcatcgggttccggtacagtatctgcatcgttactcaaaatcagttctccattagcaaaaccgatcccgatattaaaggcatgggcttttccttggttttttttggatgcataccactcgtagattagggtaggtttgctgcaaacgcttaaggatttctggtgtttgatccgttgagccatcatctgtgactaacacttcgtaacgggtataattcagtttattcattaagtaatgaatggtatcttcaatgaccacttcttcattatgggcagggaccatgatcgtgatcattggctctacttcttcgggaatggggatccattcaatctgttgatgcttaaacaaatacgtatgacaaaggacgccaatgaaccaagcaaagccgcctaagattggataagtaaataaaatggccactaatagaaaaaggaagaaatccactatcgggtatcccgtatcgatttgttcaatcatagagagacccccttatctttatacaactttactatttatgtttccgttagattttgttccggtttcacttcataataacaaacagaatgccgcatctcttcaggaccaaaacggtcatcaaaaaattcttccaacacttctttgcgctgttcaagttttctttcatcatgcaagacttctttccgcaatgtatggcgaaaacgccgattgttcctcacggtcaacagaacaaaaagaataactaaaagaacgaaggaaattcctaaaaacaatgctaacaatctaaaaatagtggcttcctccacataggtcctaaatcgtatttgagcggctgtttgcggaaagaaaaccgggaaagcgacccaaacgaatggtacgatcacagcaatccacgcaagcagtgtcaaaaatgattgccacaacgttaactttaaatgtcctttttcaaaaaacaaatctgaaaccagctgttgactgacttcttctctggtgattctttttttcatcccacatcctccttttggctgtaactctcttctccatctatacatcgcttattcctaaaaagaagcatcaaccctggtagcggtcacaaaaacacttaatcaaaaaaagctatatttgacctcttgtaggactaggtctaagcgagtatacctacattttagttgaatcgattcgaaagaaaaagaaactagcttgcgccagtttccttgtgattctattcttttaattcgacttcctaagaagaaaaccgctaacaacaatttcaaaagttatcaggcaagtccatttttttgaacacccacgaatcttgctttttagtaccctttcatccagacagattctaattgatttccgtccggatcaagcacttcaaaaccaagcatttcttcctctggaatccccatctctacttgaaacgactgtcccccattggcttcagccgctttagcaaagtctcgagctccttcaggtgtatcaaagctaaatgcgatcaaggcagcattcgtcttttgcgtatccgcaatctttctaccatttaaaaactgttcataaaacgcatattctgacagcatcacccaaatcgtctcattccacatcattccacttgatgtttcattcgaaaattcttcattcttgctaaagcccaacgcttcataaaaactagtagctcgcttgatatcttgaacaggcaaattgataaaaaccatctttcccatgctgtttcctcctttgacaaacccgagcgacatgtcattgctcctttattataaagggccgatccagatatacaaaacaatcaatttgaagctattttcacaaaaaatgcagcggcatttttcaggatgactccttttctccatgccagctgcattgtttcatatcgatttttccgtttgttttaaagacgatcccttctgctagcagccgctgctttcgttctacggcggtaaagcccacgatctcgccgtctgctcgtactacccgatgggctggtaatgactctgggcaatatttcatggcgcgtcctacagctcgtgcaccattcaagcgacctaaagcccaagctatttggctgtaagaagccactttgccatacggaatcttctttacgaaacgatacacctcttcataaaatggattcatacctatcaagcagctcctttcaatcgttagcgaatttgcttgttcgctcaatgcacgataacttgcatgccataaagggcatgttcataaaaccattttgcatctgcaacagtcaaacggatacacccatgagaattggctttttgtcctagttcttctgcttcttcttcaatgtaatctcccgaagcgtcaatcggcaccgaatgaaacaagtagacgccatgatctttccaagatacccaatagttcgctccctcgccagaagattcattaaaaaaagtttctcctctttcagcttgaatggaataagttcctgtaggcgttcttcggtctcctcctgatccggtagagcaaaccatcgtataaagcactcgattcttccgcatgatcttcacccgctggtttgccaatgagacatcgacccaatctccttcttgtaaaacaggataggctttcttctcagatggatgacgccaatctgtgacggctacttctgtcgaagaagaatcctctgaggatttagacgttcctgatctctcctttttagtaattgcattttttttcgtagggatcgttgcttttttaggaatggtctgtttggtctgttctgtagactggttcttctgaccagcggctacgttatgtgataggctggcactaacgatgaataacagcacagcactcacaaacataccaatggttcttttagggtatctttctttcattatttctatccttactaagccgtcgaaaaatctctcaggcacaatttccagttcattttaccaaagctgcttctaaaacgtgattttaatcagcagtgacaaaacaagttaacagcagatttcgtttcagcgtctcttaaaaaactcttgataaaatgatccattagcagtttaacgcctttgtaactaaaaagccagttaaaaatgaaagagtagaaccagcctacaacatcgtgcagcgcttcaaacggatgcggacaggcctcattcaatcgggtggtaactaaaccctcgtcctaaaacttcagctacattgctggcaattacaaatgcctgcggatcaatgctttcaatcaattgtttgatatcagcaaattcttgatcgttgacaacgatcaataaaacttgtttctcacttcttcgatgaacaccttgtgcttctaacaaggttgcccctctagaaattgccgttgcaatggccgcttgaatctcgtcaagatattcctcactcatgatcatcacagacttcttgcggtccatcccggtttcgatataattcatcacgatcgaagtaatcacaatcgaaagaatcgcaaacaaaaattcttcaaacccaaaaaccagtaaactcattgttaccacaaccgcatctgtggctaaaagcccgatggaaggattgatatggaaatatttctggaagatcagcggcggaatcgtagttccgccactagaagaattatttttatataaaatagcaaccccagcagcaaaaatcgcactcccaaaaataacagacagcagacgatcactggccaacatatattcaggcactacggcaattgctaacggaaaaactatgctgccgaacagcaccttgaagaaaggcgctttccccaaaaaaacataggccagaaccaacatcacactgttcagaaccatgatcacaagcgcacggtcccagcccaaagcagattccatcaagattccaatgccactgacccctccagctgcaatatgatgaggacctaaaaacatgttgatgctcaccgctagaatcaccagtgcagagagtattttactataagttatcaattgcttcattgtcttcctcttttctttgatcatccgaatagaagctgtcatttttccgagaacttgtgcttttactatccctcatctctgagttgagacaaaatttctgttcagaagactgaaactttttttcttataggatcaagtacaggtaagaaaaatttgctcaaaacttggttgttcaggaaccttttgacttgcgttctgacgttcattttctcacagaatcgttggaaaagagaagcatttttttcagccttctctgaaaatgatcatctagaatgctgctgcatttccatctttttgcacttgactctctttagggattcccttattatcaaggttaacgattttaaatcagaattttctgaatttttaggcgaaataaacaaaatgaggaaggatgaaccatttgaagacaaacaaacaaaccacttggtctggcgaacccaacgaagcagcaatccaactgctccagcaagaaggcaaagtcatcgtttgccccactaaagtaggctatattattgccgtctctgacaagaaaggactagaacgcaagttttctgccaaaaatcgcaaacgtaataagccaggagttgtattatgcagctcattggaacaattacaagaattagcggaatggaacgatgaaattgcggcagtttaccaaaaatgttgggacaacgatgttctttttggcgcgatcttaccatggaaagagtctggaaaagcatatattcctgacggatcgcaagaattgatgatggataccagggaaacgagttgtttcgtcatcaaattcggcgttcctggagaacaaatcgctaaagctctttgggaggaaaagcaacagctattgtttgccagctcagcaaatccttctggtaaaggcaatcgtggtctggtggaaggaattggtgaacaaatcgctaacgaagcagacctcatcattgaaagcaatgactatgtcgcttcgatccaaccagataaaacgatagagacccgctacgaacaaggagtcatggtttctttcgtagattctgctggcaaattgattcctcatcaaggctctcagcgatcgatcaccccggcgcctgtattgattcggaagggtttagctgtagataaaatccaactgtttttgtccgatcacttcaattcctgggactatcgccacggcgaatactactaagcaattcatagattaggacatcagtccaagcattcaactaaccttagctacgactcttcgaccgtagctgagactttagatcgaactgcttacagctgatgtcctaattttttgagggtaattcttgcatacaacagcattttcctttcaatactactcttcacagatcaaatcatttctttgatcgtcatgatagcgttccagatttaatgattcagcttactggttacatcagtcagtcccctatgaaaacagtctcttcctaaagaatagagctactatttcttgatgatcatctgaatcgcttgttccagcttctgtgcttgttcttgaggatctttttctggattctcgaaacaatctttcaagttctctgcaacaatcatgcccatcacacgatcgatgcttgaacgtaccgcacttaactgagtgatgatatcgatacattccttctcttcttcgatcattttttgaaccccacgaatctgcccttcggcacgttttaaacgattcagcacatttttttgttcacttcttgtcttatccatcgtctcactcctttcctattagaatataccctacaacggtataacggtcaaacattcttttcgtatccgcaatgttaatcaaatcaaatcattgacaaatatagaaaaacggggtttaatataccccataccgtatataaaggagaatgtctatgttttcattgtttcgttctgtcccttccatctctattcgtgatttttccgcagcactaactgcaaaaacgaaagttattgatgtccggacgccctctgaataccggggtgggcatattcgaaatgccgccaatgtcccattaaataaaatcgcccactattcaggaaaaaaagaaccgttatatgtgatctgtcaatcaggcgtccgcagcaaacaagctgccaaattattgattaaaatgggctatgatgccacaacgattcgcggtggcatgaatcaatggcaaggaccaattcaaggaggaaaataaaatgaaagtactgattgtcggtggggtcgccggaggcatgtctgctgcaactcgattacgccgcttaatggaagatgctgaaatcattgttctagagaaaggtccttatgtgtcatttgcgaactgcggccttccttactttatcgcaggtgaaattactactcgcgatcaattactactgcaaacaccagagtccttaatggcacgttttggtttggatgttcgtccaaatcaagaagtactggctattcacccagaacaaaagacggtgactatccatcgagattctgagacttatgaagaatcatatgacaagttgattcttgctccgggagcaaaagcaatcataccaaaaatcccaggattagaccgtgccacaaactgccgtcagttacgaaatgtgccggatatggatgctattttgcagaaaatcgatcaacatacccgccaagccgtcgtagtcggtgccggctttattggattggaaatggcagaaagtctgaaaaaccgtggcttagaggtcaccatcgttgagaaagcatcgcaggttttaccttcgatggatgaagaaatggctgcctatgtcaaaaatgaattgatagcgaagggaatcaaggtcattacgggccaatccgcagtttcttttgaagaagaagggaaaaaaattcggttagaagatgacactgtactggactcagacctgacattattgtctatcggggtccaaccagaatcaagattagcagcggaagctgggatcactactggtattcgaggaggaatccttgtagacgaaaactaccaaacgtcgcaaaaagacatttacgctgtcggagatgctatcgtcacgaaacaacaattaactggagaagatgcgttgatttctttagcctcaccagctaaccgtcaaggccggcaagtcgcagacgtgatcgctggtctgccaaggaaaaaccgtggcaatattggaactgctatcctgcgagtctttgggcttacagcagccatgaccggattaagcgagaaagcagcagtatctgcgggcttgcagccagctgtgattcatgtcagcggaaaagatcatgctggctattaccctggtgctaaagatctgctattgaaattgatttttaataaagagacaggtactctctatggtgctcaggccgttggacagagtggcgtcgataaacgaatggatgtattagccacagccatcaaaagtggattgacggtggcagatttaacagaactggaactaagttatgcaccgccttttggttccgccaaagatccagtgaacctgatcggctatgcggcattgaatctaatcgaagggatcagtgaatcaatccagtggcatgaactttctgcagaattagctgccggcaaacaattactagatgtccgcaatacagcggaaatgactggccgcttcaaaaacgccctgcatattccgctgaatgaattacgagaccgactgactgaacttgatccgactgcttcttatatcgtcagctgtcatagcggactgcgaagctatttagccgaacggattctcaaacaatctggctacgaggcaaaaaatctagacggggcttttgcgctttatcaaactgtcagaccggaggaaatcattcatgtatcgctcgatcacaatgcctgaattttatcaagcaagcaaacaacagaagttccacctgattgatgtcagagaagtcgatgaatttatcagcggacatgtaccaaatgcgcaaaataatccgttatctcacttcactactgccaatttggagaaaggccttgactactacgtgatttgtcactcaggtgctcggtcagagcaagcctgtcactatatggaccagcaagggttcaaggcgatcaatgtattaggcggcacttctgcttggccaggtgaactcgtttaaaacacgttacaccaaataaaacccaatgaccgctactttgatccaagtagcagtcattgggttttggtttaaactcgtcagttaactattcaaaaacaaattgattgtggtaaagttcggcataaaacccgttttctgccaataattcttgatggctaccttcttcgatgacttgcccctcccgcaagacaacgattcgatcggcattcaaaatcgtctttagacgatgggcgatgacaaaactggtccgccctttgatggcttcatccattgcttgctgaatcttcgcttccgtcaccgtatcaacattactggtagcttcatccaaaatcaataaagatggattggtcaaaatcgtgcgagcgatactcatcaactgcttttgcccggtactgaatagattgttttcttccgtgattggtgtatcatacccttgttctaacgtcatgataaattcatggatgttggcctgttttgctgctgcaataatcgcttcctcactggcatccggcttaccaaaagcaatattttcccgaatcgtcccagaaaacagtaccgaatcttgcaacacgatccccacatgctcccgcaatgcatctaaatctaactgtcgaatgtcctgaccatcaaatgttactgagccattcgtcacatcatagaagcgattcaaaagattcatgatggttgtctttccagaaccagttggtcctaccaatgccaccatttcaccctttttgacatggatggtgacatctttaaggattaaacgatcactatcataaccgaaatcaacatgattcaatgccacttcttgcttgataccagtgattttttcaccatttgccggtttttcttcatccggttcatcaaacatctcattcaaacgacgggcgccagtgattgccaattgaatcatgctgtaaccagaagaaatctgcatcaacggttgatagtattgttgagaatattgaacgaaagtcaccacaaggcctagagcaactgaacgttccaaatccccattcaatgctaaccaaccgccaaagaaaatcacgatcgccgtgttgaccagcgacattccttgcatcattgggaaaagcaatcctgagtaaacttgtcctttgtaagtggcttcccgaacactttggttgtgctgcaaaaatccatcaatcgtttcttcttgaagaccgttggtgatgatgatccgttggccgctgattttttcatcaatgtacccgtttagttttcctacttcatcttgctgcagatcgacatatttgcgagctttttggatcacaatgactgcaatcaggatggcaattggtgtagacgcaatcgtcgcccaagctaatgtgacattttgtcggaacatcatgatcaaaatcccgatcatcaataccacattggtcaatacttgcagcaatgcttgattcaagctgttttgaatgttatccaaatcgctggtaaaacgactcaaaatttcaccatcttgatgggaatcaaaaaatttgatcgtcaatttttccaatttattgaataacccgattcgcattcgattggtggatttccccaccacttgcgtgaacaagatactataaataaagtttgctccacttgccaatacgtaaaacagcagtaacttccagatgacagatacgaattttgacttgtcatctacgccttgcatcaatccaccaacataattcgctaattcctgaaaggcttgccccacatagaccggtgcttggacttgcagataagtggctgcaatcacggtaatgaaaatgaaaaagaaagagagtttgtatcgttttaaatagtgataaaaaaacttgcttgctttgatcaaatccgtcatagttattcagctcctttctgagtctcaaaaatttcctgataaattggattgttggcagctaactcttgatgggtacctactccaaccagacgacctttatccaacaccaggatgcggtccgcattcacaacagaagcaattttctgtgcaatgatgatcgtggtggtagcttgcagttctttttcaaaggcttcacgaaccagtttttccgaacgagcatccaatgcactcgtactatcatctagaatcaagatttttggttccccgatgacacctcgtgaaatagacagccgttgcttttgaccaccagaaaaattactgcttcgttccgctacgggtgcttcaaaacggttcgtcaatttttgaatgaattcacttgcctgcgcgatttctgttgcatgggtcatttcagggacagtggcgttctttttgccgtggcgcagattttgggcaatggttccggagaaaagaatcgctttttgtagaacaaaggaaacggtttgacgtaagctttgctcatttacttctcgtaaatcgacgcctccaactcgcacggttccttctgttggatcaaacaagcgcggaatcaattgagctaatgtcgatttccctgcaccagttgccccgacgatcccaatcatttctccaggagcgattgaaaaactgatgtctgtcaaagcatttttctcatccccaggataacggaaagaaacgtgctcgaatgccacactgcctgctaattcttgctgtggaacatctttgtaggacaagtctggttcggtaaccagaatttctttcaatcgtttgagagagaccgctgcccgagaagtcatcatcatcatcataccgccgataatgatcgccatcatgatctgcatcaaatagttcatgaaagaagcgattcccccgatcaatgtcggatcgtcttttgcaaggtcgctgacaaagaagatcgcgcctacgaccgctaagttggctgccagcataaaggacggaatcatcacagagaaaagcgtaccaacgatgatgttgtgttttgttagttcgtcgctgactttcgtgaaactgttcaattgatttttttcttgaacaaatgatttcaccacacgaatccctaaaagattttcttttgctgcactattgattttgtcgatcaaattttgaatgatcatgaaatgtttgcccatctgtgtaaaagaaagaccagtaatgatcactactgcaacgatcaatgcgacgattacccaccaaagttgaggcatcgtggtcatggctaagataaaggcaccaataaataagaaaggaatccgaaacaacgactgcaaggagatcatcactaaattttggatttgggtgatgtcattggtcagtcgaaccaccagatttcctgctgagaatttctcgatattaccaaacgagaaagtttggattttacgaaaggcttcttcacgaatatccgcactgactccttgcgctactttggcagagaaaatagtattgatgaccccagccaccagcccaaacacggctagaccgatcaattggaccccaatcgatttcatttcattatcgtcttctttaataattgcttccaatacttgttgcagcagcttcggctgccataacgtagccagtaccatgacagctacagaaaccagcgcaatgaagacagcgcctttgtatttctttacatggcgtaaaacaagatccatcttaaaacacactcctttacagtttgacaggcattatttaacactgtaaaataaagccggacaataatttaccatttttagaaaaatgttgcaagcgaacaaaggatgatttttttatggaacagaagttatcaaaagaatcaattattcatgcggcttttgcctacctaaaggaaacatctgacctttctcagttaaccatgcgcaaattggcaaaagtactttctgttcaagcaccggcattgtattggtatttcacgaacaaacaagagctgttgcaagcgatggctgaaacgatggaaaatgatctgccggatgtccctgcgggtagctggcaagaacagttgcaaacctttatggccaattactacgatctctatctccaatatccctgtggtgcagaactagagattcatacgattccttcctatcctagccgactgctgcatttagagcaaatgatcactatattgatcgaagccggcttcactcctgcccaaagccgtcaaaccgttcaggcattgcatcatctcttattgggacacttactcgatcgtcaaaaagaagaacaattacgagcaaaaattgtaactggcgatgaaaaattgcgggcacatgtctctgctatgcgcagctatgttgttgagaatcatttaaatgggatggcagaaggcatccaacaacgcaaacaaatcgacgaacgtcaagtttttctggagagtatcgcgatttatctggctggcttaaacaagcgaaatacctctctaaaataaaaaaacgccaacaaatctcactaagtttccttaaatcgctttccgatttcaaggcacgaggctcgttggtgtttttgttgcgttttttaaagcgttgttagttcttctttttgttttttcgtcaatttctgataaaccagttcataagaggtcaaaatcaactgttcaatttgttcgtctgttacctcatccgctgctagacgaatagaattccagtgggttttattggcatagtatccgggaataatcgcctcagggtattgttcacgtaattcttcattgacttccggtttatttttcaacgtaatgatcgcatcatcattcgcttcaggactcatcataccaaactgtttgccgattagaccaaaataaatcgtcccccaatcctcacgataggccacattagcacctgccaatgactgaccgtaacttttcaggcgatcgattcgttgttggatctgattattcattgccatccctccggtttgaaactgattttttctttagtgtaccatatcttagagggtttctttcataagcaaactgttgatttagataaaaaaacagacccgctaagcgagtctgtgatacgtatgaatgtttggcttgattaataccaaccgttagcttcccagaatgcttttgctgcagaccatgaaccataacgtgaagcaacataattatcggctactttttcttgattggccgctgaatagtccccattcaagtaagagttagtcaactgataacgtccatagtattggccatttgttgctgtataagaaccgccagattctttgttcgcgatccattctttagctgaagcttctgagcctgttgctgcagaactgcttgatgcagatgagcttgggcttgtttgttggctgctggcaggttgtgaagctggttcttcataagtgactgatgattctgcagctgctgaagaacgttcaattgtatagctggcatcgtctgttggtaagaccagtgtttcaccaacatagatcaagtttttgttcgtaatgccgtttgcttcaacaattttatcaacggcttctgaggtgccaaaatagttataggcaatcgtagatagtgtatccccagattgcaccgtgtattcttcatcagcaaacgcatcttgtccacctagaaacacacccagacctgcaaggacagctgtactaagcaaaacagttttcaatgacttcataaaataattctcctcatcttgtagcgtttatagtctatcgcaggagaaatctccaacgcatagactagtctaacaccagagaatatttcataggtgaaaatctcgttacagatgattacgaatgcgtcgagttccttacgtttcgtaagcgtcgcgtaattccttttgaatcaacaacgattatcaacataaaaatataaattagttattttatttcaataaaagtgaatcccctcttttttatttgtgaattgttacaaattggatgaatttacacacagtcgtaacaaaaaaagctgcagctgaacagcgcgtttccatgaatgcttgttgcatcgattggagcaggcgttcacttgctgcagcatctttcgctgacactttatcaaaccgtttttttcactggaatcaacttattcatcacaatagcagcaatcgcacttaacgcaatcggtgaatccaataagtattgtagaaattgcggagtttcttgtttgatctcagccggcatgaacaaaagaccgatcgctaagattagcggaacaccaataatatagagttcacgttcagaaaactcttcattcttgatcactcgaaagccgctaagcaaaatgatcacacagacaactgcgaagacaccaccgattaccgctgaaggtacggcatggatcaacgctgataacttgccgacaaatgacaagaggatgaaccagcaggaagccatcacaaagacttttttactggcaaccccagtaatggaaatgataccggcatttgttgaataccccgtcactggtgtcgttcctactaaagcagccaccaggcaaccgattccttcaccaatgacacctttattgatttgttcatctgtcacagcttcctcagtgacagagctgacggcataccaagttcctgttgtttctgctagtaataccatataaatcaccagcatcgtcaaaatagctgaaacatcaaaatgaagaccataattgacgaaaataagttttggcaaactgaaaaatgaagcatccgcaacagactggaagcctacgccgcccatgaaccaagcaatcagcgtcccgatcattaaggcaataatcaccgagctaatccggaaatatttacctaaacgagggaagtaatcacctaacatcgagaataaaatcaaaattgctgctgtcactgcagccaaaaacatgttctgattagccgataatgtctcagtagctggataaatgttgctggtaaaagctgtaggtaacaatgtcagtccaacgatcatgataatcgtgccactgacgatcgtgggaataaagttgcggacaatatacttatagatccctgtcatccctaaaagaataacagccaatgccccgacaatactagctcctaagacagtatccataccttgcgctccaaaatagataccaatgattgcgcctactggtacaaaggacggcccttgacagacgggcaatttcaagaaaaagagaacttggatcagcgaagcaatcccagcacctaaaaaggtggattggatcagcccggctgcatccgacgagctcatggcaacagcagttgcaataataaagggtgggacatacacatccattgccaacacgtgttgtaagccaagaacaatggcttgtcctaaaggtatatcttcattcattccgatcgttaaacgattacttctggtttccacagtatcaatctcctcatttttcatgtactttttttccttgcacccagacctgacgaatgttttcagccgttgctagatacaaaatcttttgtaattgttctttcggttggttcagtacaccaaaagctggcaatggattaccagaataacaagtatcgatcacttgaaggtcgcaagcgtagccttccttgataagaccaatcggtagtcgtagcgcttcgccccctccttttgtcgccaatgaaaaagcgtcgatgactgagatacgcgcattcgcaacacctcgattcgtttggggcaatgtaacatccacaccgtcttctaacatgcgggaagacataacagcttgcttgatattgtcatacaaacttggagaaaagccgccggagatatctgtgcctagtccaatcgttacgccttgttctttaagccgattgatagggatcacaccattggcaaagtacgcattggaaatcgggcagtgagcaacagcagtccctgtttccacaaagatctcaccatctttttcatcgataaaattacaatgagccatcacagctttttctcccagtaagccaaaatcccgcaagacttctgtgtcggttttaccaaatcgttccaagacgtgatcgtgttcccattggccttcactgcaatgggattgtacatggacatcgtatttttgtgcgagttgtcctaacccagccagaccttcatccgtgcagcttgggacgaatcgtggtgtcactactggatagactccttgacgtgtcgtttttgccaacttttggacttctttaatgaaggtttcggtctctgctagtgccgtagcagttgaggtatctcgataaaaatctgggttcgcgtcgggatcatccatgactactttccccactagccctcgttgacccttctcagcacaaatcttggctaattgtaaacttgcttccaaatgaacggtcgcaaaataaagaaccgtcgttgttcctcgagccagtagttgcgcaactaaatcttggtacacttctgaagcaaaacttgagtccgcgtattttgcttccaacgggaaggtacactcatctagccatacattcaacggctcatccaatgcaactcctgcttgcggccattggggtgcatgaacgtgcaagtcgacgaatcccggtaaaaaatactgtcccttctgcaattcaactagcattccttgtttggcagctgccagcatttctggatagtctgattgttctgttgtgaccacccttttgatcatcccttcagcatccacgcaaatgaggacatcctctaagtattccagcacgccatctgtgggtgtatgaaatatagaacctttaaaatattttgttattgacataagttttctcctttaacaaactgcatcagactgctgctttgacattagcagttttcattaaaataagcatcaatggttttattttacattcattcggatttttttcaataaaaaccgtacattaatcctgacaaaaagaatctaatgttcgtttttaaggcaaaaaaagacatttggtgtgttcaccaaatgtctttccttcacttaaagctgaattgtcgtaccactattgccagctaaagtttccgccgctttttccaatgaagcgatcactgcttgacgcccatccttggaagcagcaaatgcgatcgctgcttccacttttggcaacatactaccaggtgcaaattgatttcggtcaatgtacgtttgcatttcagcgacagtggctgttgtcaatcctcgttgatctggttgaccatagttgacaaagacttggtcaacagcggttaagataataaagatatccgcatcgatcagtaccgccatcttggctgcagcaaagtctttgtcaatcaccgcgtcaactcctttatagcgagtgccttcataaaccactggtatgccgcctccgccacatgcaatcaccacttgacctgcatctactaatgtttttagactgattttttcataaatgtccactggtttaggagaaggaacgacccgacgccaacctcggcctgcatcttctatataagtgtcgccgctttcagtcattaattgctgagccttagcttcactatagtagccaccgattggtttcgttggattcgtaaaagctggatcagctggatcgaccaccacttgcgtcaacatggaaacgaccggaatatgtgccaatccgcgagaaacaagctcttcatcaatcgcttgttgcaaatggtaaccgatgtacccttgactcatagctgtgcattcaggaaatggcatgacgtcttcttgcgttttgctggtttcctcaaatgctaagcgaattttgccaacttgaggaccattcccgtgagcaatcaccacgtgatggccgtcactgattagatcagcaatcgattttgctgccacttgggctttggtcaattgttcgtgcgcagagtcgcctaaagcatttccgcctaaagcgatgacaatttttgacatacgtctcctcctatctttgcggttgttgttgcgtgatacagtgaatattcccgccaccgtatacgatctcaactgtatttacgcccacaacttctttatctgggaaaatctctgctatttcttcaagtgcccgcgcatcattttcgtctccgtattgaggaacgatcacaccgttgtttgtaattagaaagttcatataagaagcaatacaaatgtcgccatcttctcgcggcatggttccttctacgtaatcaatcttgaaatccccattgatcgtgacattttctactgggcagcaaagcttatgaacttttaatttgcggcctttggcatcggtcatttcattcaaacgcttgtatgcagcttgagccgcttcataaaatgggctgtttttatcttcagtatagatacaagccacttctccaggacgtacaaaacatgccacgtcatccacatgtccattggtttcttccggatcgatcccgtcagctaaccaaaggaccttctcacagttcaagtagtcgcataatttttgttcgatttctgcttttgtcatatgggggttccggccatcactcaacaaacacatctccgtcgttaacacagtgccttccccatcgacatggaaggatcccccttctaaaataaacccttccgtccgataagaatccacttgctcgatctcacagatcttttgagcaactaaatcatcttgatcccaaggaaaatacaagccatcgactaatccgccccaagcattaaatccccagtcattgcctcgtaattcgcctttgtcgttgatgacaaagctaggaccacagtcacgaatccatgcatcgttattggacatttcatagacagtgatgtctgcaggcaattgacgacggcagttttgatattgttgttgcgacacgaccacattcattggcgtgaatttgctgatcgcttttgcgacttcagcaaatgcttcttgagctggtttgcccccatcacgccagttatccgggcgctctggccaaatcatccatactttctcttgtggttcaaactctccgggcattctaaacccgtcttgtttcggtgtggtcttttcgattcgtttcgccatgatacagcactccttcttttttgatttttttgatccagataatggcttcaccaacgagggcaaatacaattgctccaatcgtgattggtaattgctgactcagtgattcagcgtcaaattgcaaaggaagcgctgtgaaaatcaatgagatcacgatcatgatcatcggtagtgcgactaataccttcaagaacaaatcgctgccgctcaccttgaaaggtcgaggtgtgtctggatcaattttacgtaatttataaaacgcagaaaacacagggacatacgatagtaggaacattactaggttcagtgagaaaaatgcccagaataaatcttgatttggtaaaattggggcgatgacgacgacgatagaagcaacgataccattcataattgccgcaccagtaggcatgccattttttttgctgcgtttggcaaatactttcggcatatcgccattttcggccgcatagcaagcagtattattgacccctaacgaccaagaaatcatgttgccaaacaatgtcagcaagaacaaaaaggccatcgaaataatgaaccagccgcctgttgatcctgtcaataatttaaaactatccatcaatccactgccggtactgatttgatccgtaggaatcgctacaccgatcccgaaagcagaaaaaatgtaaatggcggcaatcaccagtccaccggcaatgatcgattgaggaatttgcttcttagggttttccatgtcacttgcaaatgtacaaatcacttcgaatcctaataagttaaaaatgattaccgagataaaagacaaactattcaaattgaagcttggcagcatcgaagaaagagtgaactcattcgcaacacctttggtaagggccgtatagagacctaagccaccaatcaagattgctaacagcatcttgatcactgctgccccattcaaaatccacacactgtcactgaccggataaaaactgatccaaacgatgacccatataaaaatcagttcgatcacgatagcagccaccgtggaaaattcacgacctgtgatagtcgtcaacaagtcaggacagactacggctagagaggctaaccataatggataattgatccagtagtaccaagaaacccgagaaccccagcgatgaccgaaagcttgtgtcacccaatcataaataccgccatcaccaatatacgttgttcctaattctgatgagattaacccatagggcaaaaggaacgcaaccaatagaaagatccaccaaaaaaactgtgaatttccgattgctgctaccggtgcagccgcttctgccacaaatacaacacaaataaccgataagatagcactcatcaaactaaattttttcttttctcccattgttttcttcctttccggtacaagggaataagggttgaccaacgattgaaggattcttgcaactagcggatttctctctcgtgaatcccagttcagcacataagctgcgacattattagaacgagcttccgctcaaaagaatcgattcgcagttcgttggcccctcctcaagaaccaaaacagtcttcacgcatccccttgatacgcagactatttcctttcctcatctcttgcgtctagtttcatctaacaaaacttccaagtctttttcagccgctgcttttttggtctcgtcgattggatttttatccgcataatcccgcatcaagtacactaagagaccgcgaatcgacgttaaccggttttctgcttcatcaaaacagatcgagtttggtccatccatgacctcatccgtgacttcttctccacgagtggcaggtaagcagtgcataaatttcgcttgttcaccagcgcgtttcatcaagtcagcgttcacttggtatttagggtaaaaaatacgcatgcgtccctcttctgataattctgcttcatacagtccataccaaacatctgtataaacaaaatccgaaccttcgatcacatcgatttgatctgatatcgtataggaaccgccagaatctttacaaatcgcgtctaatcgtgcgcgatggtcttcgtttaactggaacccttctggaccaaattgaacgaattccatccccatttttgttgcaatcaatcctaaagagaaacagacttgtgtggcatcaccaataaaggaaatcttgcagtcttcgatttttttgcctgctggaagatgttcgatcatggtgcaaagatcgccaagttcctgcgttggatggttgaagtcagacataccattaataactgggatcgtcgcattcgttgctaagtcatacacactatgatgccgttccacgcgagccatcaaaatgtcaactaaacgagaaagaacacggcttgtgtcttctatcgtttcatgaccacccaattgaatttgtcctggtgcgagatattctgcatgtcctcctaattgtgtcattgctgtttcaaaagaaacccgagttctggtagatgattgttggaaaatcatccctaatactttgttctttagtaaaggggggtaataaccatttttgatggccgctttgattttcaatgacaggtcaacgatttgttggatctcctccttcgtgtaattttccgttgtaataaaatctcttttttccataatgaaacctcctaagtgatttgtttgcttttgcatcttcactttaggtaaaaaaggcggagtttacgataagctattagttgtaaacgttatcacacttattctatacttgctgaggacaagtttatttttggatataaaccagttattttccaagggtttacaaaagtttagaggaaagtttagcggaattaaaagtaaagaaaaaacaaatggtgttataattaggataagaaaattggtgtaagaaaaattgaaaggggattcaatatgatagctatttttatatacaatattttattgatcattctatattcaatcacgatgacttttgctatttattcttacttaaaagaaaaaaacaaattatttctttggattagtttgtatctggcattctttatttttgacaatacaattatttatatgacagaatttcttaattcctttgcccaaagttatgatcaggcatttatgagtgcaccagcagttaaaactattatatttatgggaaatgcctttttctccatttctattcttgccgaactacacaaagaaaaaccctctcccctccattatacgctattgatcgttttggccatttggatgattacgaccccactgatggaaaactcagcatttaaagtttggctctattatctgggtaatcaactcttccttttttatctaggaatttattgttggcaagggaccaaaaagaagctccctctactgaacaaacactatttaaaacagttgatgatcatcaatctcttctttagtattttgatcataattgaagatagcttcgtgattttcaatgtcgaccagtacagctcgttagcgacaaagatttataatcgcagtatttcagaggatatcttttcgattgttgtttgtatattattactgcacttctttatcaaagaacgccaaccacaggaagaaaaaccgcaagagcaagacgcctctctcttgattcaaaacttttgccgtattcatcagtttacccaactagaaacggaaatctttgcgttgctgttgtcccatcaaaccaatcaggaaatcgccgatcagctctttctttcattgggaacggtcaaaacccatgttcataacatttttatcaaacttgagataaaaaaacgcacgcaaattatgattctttttgaaaagtacaaagagacccatgaggcagctgcctaaaaaagacctggaaggatcgcttccaggccttttaaagtttaaaaaccagtcattcattgctctgaacggcttattcttccatatatgcatacttgatgatcgttgacggtccgaaagttggatagtacacacctttcagggaaggattgaccataatactacgagctctttggtagattgggacaatcccggcggtttcttctactaatagtttttctgctttgatcatcgtatcccaacgtgtcgctaaatcattggcataggtcgtattgctatcagcaatcaactggtcatagtctttattttcataattcgtgttattcggtgaaacgagattgtaaaggtacgtcatcgggtcttgataatctggtccccatgttccgatagctaactcgtaatcgctttttcgtgtcaattcaatcgaattattcaatgggacagacttgatttcaacggtcaagcccggtaagactgtctgtaactgatcctggatgaattcagccacttttttatctgcatcagtgtctttggttaacatctcgatggagatcttatccccaatatcagcagtggctttttgccagtaagcgagtgcagtggctttatccggtccttcgagaggcgcatcttctcgaaaatctttgccagtttccggattgaagacaaagttattcggaataaacccattgattgcttctgatccatctgataagacatctttgactaaagcttctttatcaatcgcataataaacggcttttcgtacattttcattggcaaagatcgtatctttaccatctcttttctgattcatcttgaaatagtggatataagaggtcagcaccgtctgtagttcttcgttagcggcattttgcttcacgtattccccataaatatccgccatatccaactgtccttcgttgaaaagattatatcctgtaacagcttctttgatcacttcataatggatattctccagtttgatggcatcacgattgtagtagtcttcatttttttccaaatcccatgtagaggaagcttgatcccaatttttcatcaaaaaggggccattagttaaaatattttcacttgatgtgccataagcatcccctttttcggtgacaaaagcttcattttgtggaaaaaatggagtaaaggccaatatcgaagtcaaataaggaactggctgttccaattggatctcgatcgtgtactcgtccgtagctttcgcacctagttcagaagggtctttttccccattgatgatttcggtgccatttttaaatgtaccgtccaataaaaacatgtagtttgcttgattggctggcgtggctagccgttgccaagcataaataaaatctttagccgtcactggctccccattactccaagtagcatcttctctcaacgtgatcgtgtaagtcagaccatcgtcggatatgttggggaaatctttggcgatagccggtgcgaccttattggtgtcatcgatttgatacaatccatcaaagacattgacttgggcattgatacttgccgtatcttgtgtagagagtgtatccattgatccgatttcgctttgttccatcaaattgacctcactgctcgcttgggcagtcgctttggattctttctgataactacaacctgaaaaaccgatgacgctagcaacaaccaacaaaaacatcattcttttttttcctttattcctcatttacgtcctccttttttacatgcgtcccaaccgcttatcgaagcgctttttctaaaatcgtcatctcaatcaattcagcttgccaatccagctcatcatatcggtagcctttcttggcagactcaaattctccccgctgattgtcgatggggtctgctcgtaagaattgcttcgctacggtaaatcccccttgaatacagttattagcaggtaagcgaaaaatatctaggtttccaaaataataaagccagcgctcttcatttccgcctcgaaatgcgctgcccccaaacgaaacatctacataaagccaaccgtactctggtagatagaagcgcgcccagtcatgagggcccacaaaaaattctgaaacatataaacccgactcccattcagctgggatattcgccatacgacacaaagtgataaataaaagtgcttgaaccccgcagtctcctttctgattgactgcgcagtactcactgatattcggaatcgcataatattctcgcataaatgaataggtcactttggtggtcacaaaatgataaatcgcatacgcacgttccaagggattttttgcttccggcaaaatttcctgcaataattgctgtagaaaaggcgtaaattgaatatggggagcgaattcattgagcgctgatgcaaatgcgtttttttccgactcagtcaactcacgaatcatggtttgctcatccaacaactggaataaatccgtataaacagccgtcaattcatagctgtgttccacagtcgcttcaattgaggaagggtcgttggtttcaaatgcgatcgttcgctgtggtgcagcgaagggatcaatctgcttgaccgctccttttgtctgaagaatcttggcatttgctacctttccagtgtctcgaggcaaaggaatgtgcgtcaagaaaggaccgtcttctttattaagcgttgttagtggtctaagtgattgtttcaaaacgattcgagcagtcctttgtccgagttgtttcattttttctacattctcatccagttctacttgtcgggcactgtcaattccgttttcttcctcaaataaatagcgcgtataatagtctgagcgcgtcttaacgagattagcaataaagcgttcatggaaaacttttttgccgttcaagtagatccattcaacctctcctgcttccactaagcgatccagttcttctcgctgaaaatcgacaaaggactgttgcatcatctccagagctttggtttcttcatagggatattgctttgcttcaaaaacagtcaaaacctttaattccgtgtgcaaacgatcttttaagacttcactgatacgggcattgttcaacttctgatgaatgagtctacgtgttaaagaaaaatcaccaaaatctttggctcgttgaatgtcttctggcaaaggaaccactagattggttagatcattaggatccatactcactgcgccacctcctctttttgtttaacgcctaatccagccgcttcattaagttgaatcaccggtgttttttctgtaccaacaaccccttcatacgcaagaactgctaaatcaaacgtcgcgtcgaggtcagcgaaacgaacatttttttgtgcagcaacaaagtgagctgccgctgcgatactaatattggtctcccctgccatacaacctaccatacacgggatattcgcagcttcgcaaatactattgatctgtaacgctggatagatgccgccacatttcatcaatttgatattgacagcatctactgcatcttttttgatcaatgataacgcatcttggggtacaaatgccgcttcatctgccatgatctgttggttgacttgagttctgataaaggctaatccatcaatgtcactagcaggtgttggttgctcaaaaaaagcgatgtcatatttctgcaactgttcaatcatttttattgcctgctttgctcgccaaccttggttggcatcaattctcaattcgatggctggaccgacagctgcccgaatttgttttactcgttcaatatcgtctttctcatccaatccgactttgatcttcagtgcagtaaatccttgttccacaaacaattgagcattctctgccatcacttctggagtatcgatggaaatcgtcatatctgtctctacttggttatcctgaccgcctaacaactggtacaaaggcagtcctgtactttttcccaatagatcatagcaagccatatcgagagctgctttggcagacccattgcctttcatgcactggttcatgatgctatggatccggcttaattgccgtggatcttctccagttaatgcatcagccaataactttagagcagcttcacagccttcaagtgtctcccctgtcactaagggttcaggtgttgcctcaccgatcccaaagtcccctgtgtcagtgatcactttaatggtcaaattgctgacctcagtaataacgcctaatgcaattttaaatggcttgcgcagcatcattttatttgcagcaatttccacacgttcaattttcatcttcattcccccctctaacttaaaactgactatatcattccgtttttttcttttcaacactttttctgaattttctgaattttatttttatacagattatgcataactctaccaacttatctcctttgagcagtaaatttaataacaaaaaaagagcaaaaatttgctcttttaatcagataattgtattttattaataatcgtcgtatgccaacgaacattgatttgtttgattgtatcaagcggacactttggttgtcgatcagctgttaacaaaccgtttttttcctgttccacatccgtcaactgcgtataacaaaagccgtgaagaatttctgactgatagacagcatcaatcacccgctgatagtcctgaataaactctgcttcattagctgcattggtatatccccagccttgagcccctgtatcatagccgatcccgccaaattctgttaacaagataggaacatcttgatgttgaaatcctggacaataaatttttctgcgattgggttcagaagttaaaatcgtatcttttgttcgcaaactcgccgcaaaatggtcgtatttctccagttcttctttcgttccatgaacatagctgtgaatcccacaaatatcactttctgtcatctcccagccatcatttgagataaccaatcgagtaggatctaaagaatggatcaagtgataaatcgcctgcgaaaaatgctgttgctgacgatcgacactaatgttcggtaccccccagctttcattgatcggtacccaagttgtgatacaaggatgattgtagtcacggtcgatgatctcttgccattcagccatcactttccccccgctagttcgtgtataaacactcggtgaggcacattctccccaaacaatgaatcctaactgatctgcccaaaacaaaaaacgggggtcctctactttttgatgtttgcgacagccgttgaagcccattgctttggctaattcgatatctttcttgtaatcttcatctgtaggagctgtcatgagacttgtgggccagtagccctgatccaacactagtttctgataatacgggcggttatttaagtggaccatgccatcttgaatatgaatttttcgcatgccaaaatagcttttaacggtatcgatacactttccttgtgaccaaacatcaaagacgacatcaaagagattcggggtatctggagtccaagtccatccgcgaccgtgaaagtcactgcggtcgatcttttgattgaatagactgtaagagcgtgtgaactggtgctcggtcaactgctggcgatcagaaacaatcagctcttcgccgtaataaattctggtacacaattctttatccgtcaaatcaccagcataatgataggcgatctctacggatccccgatcaaactcactggtataaaagaccttttctaaatagccgtttttgtcaactgcctccaaccacaccgtctgccagatacccgttgttcgggtataccagatagcagcagaatgttcctgccaatattgcttgcctcttggtatttcttcatctgttgatggatcaaagacctttagtgtgagaagatctttgtcaaaggtcaaatagtgagtcacatcaaaagaaaatgaggtgtgtccgccaatgtgttcccctactaactgatggttgatgtagacccagcaatggtaatcgacagcgccgaaatgtaacaataaacgtttgtcttgccaagtatctggcaccatcagctctcgctgataccaaacaccgtcatgaaagcttttgatttcaattccactttgcttggactgaaagacataaggaacttcgatcatctgtgtcaatgcttgtggctgttgttcctctaagttgtcggtaaaatcaaattgccacttaccgtttaaattcagccatttccttcgttcaaattgtgggcgcggatattctggtctgttcatagtcgtcctttccttttcaatttttttattacgaggcaaactagcctttgcttccagaagtaagactgattccttgaatgaaatacttttgaccgaagaaaaacaagactaacgcaggaatcgtcattaatgtagaagccgccatcatgatattccattgagaagaaaattgcccttttagttgcaataatccgagagataatgtttgtttgctaggatcattcaagtaaatcaaggggccaaaaaaatcattccaagtattcataaacgtaaaaaatcctacaaccatcatggcaggtttaactaacggaagcatgatcttataaaaaatctgccagtgggttgcaccatccaggatcgccgcttcatctaattcttttgggataccagcaaaaaattgtcgcatcaaaaagacattgaacccaccaccgccaaaaaaggctggggcgatcaaaggtacaaaggaatttacaaatcctaatttattccacatcataaatgtcggaatcaacgtcactgcacctggaagcatcattgtcgcaatgaccatcgcaaaccacatattcttgtatttaaagttcaagcggccaaatgcgtaaccgcataagcaagaagtaaagacattcccgataatgcagggaataataatcaaaaacgtgttaacgagataggtctttagatccaaaacttgaaagacatctgcgtagttagaaaataataattgatcaggcagccacttaggggggaactcaaaaatttcataggaatccataaacgagctgcgtactagccataaaaatggaaccaatgagatcagtccaatcaccactaatggaacatacatcatgtattttgcttttctcatggtcatttttcttgccctccataatacacccaattttttgccgtaccaaaaaccagcatcgtaaacaaaccaataatcacaaataggatccatgctaatgcggatgcataaccaaactgattttcttggaatgctttccggtagatcaacaatgcgtaaaacaaggtcgcattattggggccgcctccagtcataatgtatgcttgcgagaatgtctggaaagacccaatcaaccccatcaccaagttaaagaaaatgatgggagagatggctggcaatgtcacatacaaaaatttatggcgccaattgccgccatctacttccacagcctccattaggtcttggggaacatcctgcagcccagctaagaaaaccagagcggtaccgccacatccccatacggccattaaaatcaaagatgggatcgctgtttgttcatcaaaaatccagttagacggcggcaaatggaaaaattgcaaaacagaattcagcaagccaaaatccgggttgaataaccacatccataaaatgtttgaagccaccgctggaactaccaccggcaagtagaacaatgttcgaaaaaatgcctgtcctcgaactttgacattcatcaacaatgcgatcactagtgcagcgatcaaactacttagcgtactgccaaaagcaaaggtgaatgtcacaaccaccgattttttgaaaaaaagatcatccataaaaatcgtacggtagttatcgatgccggtaaatttgaaatcaccgatgacattataatctgtaaaactaagaatcagactaacgatcattgggatgatggtaaaaatcaataatccgagaattgcaggggctgcaaaagcataccctgcacgattctcttctttgtgtaaatcatattgtttctttttagattgttcatctgttttaagtgtgatcattccttcgtccacctacttcacatactcgtatttgtccccgaactgtttctctagttttggcaaaatgtcttcctcaactacttctcttggagctttcttgccagtccagacctgttctaacgcggggttcacgatttgctcgatcgaagcagcatcttcactgtagaaggccttgttttttgtcaacgcttgctctttcgcttcaaccagtgcttcttttttatattctggtgaacgatcgcttacggcccatttttgaaggtatgtttcatctgagaaccaattgtcttggttaggtaaccataatcctgaatcgatgacatctaaactattctcagggtctaaaagatactctaaaaatgttttggtttcttcccaatgttcttgtgtgttttcattatcaaaaaccacgattggcggaccaaaattcatttgaacgacttttcccatttttggtaaaacacccatacctaacgctaaccctttttgttcgatagcgtcccccagggaacgtaagtcccaagatcctgtgatcgtcatcgctactctatctgtcagcattgcggtatcagttgaaggaatcgtacttgcctgtgagggtttcggcatcacataatctttgtacatcaaatcctgaattttctctaacgcttcaatcgaagcatctgttccaatcaggatttttttgccgtcctgactaagcaccccaccgccattgctgattaagaaagattcatagcctagaccagtaaaattggagatcccataggttttgatatttttttcgtcaaaaccagcatcgcctggatgattgccatttcggtcgactgtcagttctttcagaatggatacaaatttatcccaatcccacgcttgattgacgtcatgaggtggaacttcaacccccttttcttcaaaatatttcgtactgtagaacagtgtaagcattcctggccctgcaggcgatccaaagactttcccgttgtactccgagcgtgtctctgcgattttgttctcaaatggtcctcctgattcatacagctctgtcagatcccttaagttgccgctcttcccccactctgccgtgcttgtttcaaccatatagccgacatctggaagtgttttggtactagcttgtgtgtttagcttctccatataattgtcataagggatctgctgcgcttttacttggatctcgtcttgtgattcattaaagtttttgattaatttatcgatcgaagctttctccaatgtatcgccccaaaaagaaaaattgagggtaactttactcgcttgatcaccagcatcatcattgctcccacatcccgataataaaaaacttccgcctataaccaatgaggaaatgagtagaccaatttttttcatcttctttgctcctgcctttttatattccatttgtatgcgcatacaatagttcaaaaagaaaatcagacggattattttttacaaaatgattgcttcatgttgccaaaataatgctgtctgtttttctttacaatttatactatacaaaacgaaaatacatatttcttcccgagttatgtgttccttattcccgatttttgtttggctctattttctaaattagaaatcgattacatttattctatcaggcacatcacacagtaaaataaagagagcaacaccgcatcactatctatagaacaaaggagtagaatacatgagcttatacttggaaattcctgaaatcaatccgctgttccctttcaaaacctttacaaatgaagggtggtcgatcacttatcctcactggcacaaagaaattgaatttatttattgtttggaaggaactgtcagattaggggtggatgacgagatcattcaaatgcatgtagacgagatctattttttttctagtggtgaaccgcacttcttcttgtcttcgccaaatagtgaacgaatcgtttatcaatttgatatcaaactctttcaagggcatgacaatatctcgccaaatgatcgtccattggccaaagtatttgagaccgtcgtcaattacagtaaagattggcctaccccgatccaaaaagagatccagactatcttgctttctatttatcatgaaaaccagaaacagcgtgaagggtatcaatacagtattttgagcagtttgtataaattagcgaatctcttgtaccaactgccattgaagaacaaaaaaacagaaaaagccgctttagatagtacattaaaaaatcgcgagacattgttccagatcgacaccatcctcgactatattgagtccaattatttacatgcgatcacgattcaggatgttgctgatcatgtggggtttagtcctagttatttctcacgcttcttcaaaaaaaatatcgggatgtcttttaccagttatctggcagaataccgcatccatcgggcaaagtatattttaggaacagagctggttcccatggcagaagtagctgcccgctcaggtttttctagcgtcaaaacctttcatcacgtctttaaatcaatggttggcacttctcctatgaaatttcaaaaaaatattttcggctttcactaaataactacgcaagaaacctatatagtcaccaaatcggcgaattctgcatttataacattttgtccaaattaggcaacgcccaaccataaaaaagagatctggaagcatcagatctcttttttattcactctaaattgaagtcctcaaaaaaagaatcaattggtttttttaccaattgattcttgcgaatgatccagcaaacagttgctcacggcttacaacctcagagcggttgctgacatctgctcattatagaatgttgtcatgctctatttacagaccttctttcagatgttctttgctagtttttctcacccagatgtctttaccagtttgttcaataaataattcagtttcaggagctagctgacactcaactttaccttcctttaaagtaattcgcaattcttccccttgataaaaaagcttaaaggcaagttctgttatttcttttggtaggtgattggacaagcgaatgccttcatcataataaagaccagcaaaaccataaatcaaacttagccagctgcctcccatatttgccccatggatgccatcgacgacgtttttttgcagatcagtcaaatccatcaatgccgtatccatgaaatagcgatatgcttttgctgtttctccgatacgactagccatcacactgaaaatcgaacgagacagcgaagaatcatgggtggtgactttttcataatactgataatcttgttttagttgttctagggtaaaatcacccgtaaaaagcatttgcgctaatacggtatccgcttgtttgcagacttgatgtttgtaaattatcatcggatgataatgcaacaataaaggatagttagcagctggtgtctcttcaaaaggccagacagattgttcaagaaactcatcatcttgcttggtaagtccacgagacgcatcataaccgaaatacatgaggtctgcggcttgctgccattgatcgatcagttccatatgcttttcgtatcgtttcgccagttcaatggcataatataaattgttttgagccattttgttggtataaaagttattgttgaccaatgcactgtattcatcaggtccggtgaccccattgatacaaaaagaaggtttgccgtctttttcgatgaaatcaccataactcaaccaaaattttgccgtttcgaaaacgacttcactgccgacttcttcaataaagcggacatctcctgtgacccgttcatagagttgaaaagcataaacgatatcggcattgatatgcagttgtgcggttccggcaggataataggcactcgtttcttgaccatcaatggtgcgccatgcaaacagtgcaccgtcttggctcagctcttgtgcccgtttttgcgcttgcggtaaaatagttgctcgataagtaagcaatgctttcgcagtgtctggattggtgtaagtaaaaaaaggcaacaaatacatttcagtatcccaaaaataatgaccttcatacccttcacctgtcaaccccttggcagcaaaattggttctgccatcacgtcctgccccctgattcaggtgaaacagattgaagcggatccccttttgtagttcttgatcacccgtgattttgatatcactcgctgcccaaaactgctgatagctttccctctgttcggcaacaaatgtttcaaaatcaaccgcttcttgataaaagggtgcgccctctgcttcttgtaatcgcagttgaaaaatcgtcgtcagggattctccagattggatttgcccatcgccgcctatcacccgaatcgccagttttttttgactatgaggggctgtccaaatggcatagtcgccatgctcttctttcagaagctgatgctctttattcgcaacacgaggatcatctgtttgattgactgtgaagcgctggtccaatggatgggaaacagtgattggctctgtgaaatttgcatttttgattgtgtaacgacaaacataaaattcactgcgcgtcatggaggcaaaagattgcatctcaagatcaaagcttttgcctaatggggtttctacatggtaagactcatgaaggatgccttctgccatatctaatgtcagctggatttgttccgtctgccaaacgctgtccgacgactgctcttgtccgatgcttaaagaaagcccccgcaggttgggtaacttgcagatggtttggtgttctttagcatagccataagcccattcgccgtattggatcggttcactgtcaaaaaaaccattgacaaaagccccgggattcccaggatagttcgcattcactttaaggggatgccctgctcggacaccgatttgaccattccccacagcgaacagcgtttctaaatattccggtttctgatgagagagttcttgtgcctgcaataaaaatcgtttgtccatctctgttcgtctcctccgcttttttctttcagttctatcctacactactaaacacccattgcaaagaatccgacttcagctgggaggggcatctactttggttcttctgacagagtatggtaccatgaaacaaacttgaaagaaggcgattacttggatttatggctaacaaatattcgaatggaaacaagctacatcaaagaaaatggctggtcctctggcagccaaaccaaacgggcggcaattgggatcagtgaagaaaaaattaccgagatccttcccatggatgaatggaaagacacgccaggaataactgttatcgatggtcaaggccagttattgttacccggcttgattgaaaaacactgccatttggataaaagcaaattaggaactccatggcgtcctgtcacaccggcagccaacttagtagaacgttttgaaacagagattcctcaattggatgcattgcctctttcgattaaagaacgggcacaacaattgatcgatttggaattgcctcatggtgtcgtgtcctttcgctcccatattgatattgaaccaatgactgaactgcgctattttgatgcactaactgaattgcttgctgacaaaccatttggtacggaacttgttttgttcccgcaacacggtctgctgcgatcaaatgccgtcgcattaatcgaagaagcattagctactggtaaagctgcattcattggtggggtcgatccttatacattagatcaagattatcagcaatcattaaaaacaacctttgagctggcaaaaaaaggcaatgttggcatagacattcatctacatgaccgcaaagaagccggtcgtgcaacgatcaaagaaatcattcggctgaccaaagaatatgctatggcaagcaatgtcttcatcagccatgcctttggcttaaatgattttgaaggagctgaacgcacagaagtttttcaagctttagcagatcaggacattcatatcgtttcaagtattccaatcagtcagggaacgattcctccccttaaagaattacaaagttatggggttgctgttcacattggttgtgacaatatttatgattcttggtcatcactgggtgacggctccttgcaagaaaagctcgctcgttatttagagatttttggcgttcaatcacaagaggcattgacccaggcattaggcttggtaacagatggcagagtgccattagatcaagaaggaaatcaacaatggccaaaagttggcgattctgctgattttcttttgacccctgtttcttcaacgactgaatttgtcgcccgcaaaggtcacgtcagctgcagtttctttaaaggacaaccaatctacaacgcataaccaataattattgacaaaaaatgattcggtcacctctcttttgctgatttcgcttgacgctgatccgattattcggtttacttatgatagcgaatacaaaaagtgagggattaccatgtatactgcaaatatgcaacgatatgaacgcatgacatataaccgtgtcggaaaatcaggtttaaaacttcctgcaatttcccttggtctatggcacaacttcggtgatacagatccaattgcgaaacagcgggaaacgatcctaggagcctttgatctaggcattacccattttgatttggccaacaactatggtccccctgcaggatcggcagaaaagaatttcggccgcattttaaaagaagacttacaggcttatcgggatgaattgattatttcatcaaaggctggttactatatgtggcctggtccctatggtgaatggggttctaagaagaatttgattgccagctgtgatcaaagcctgcaacgtctaggcctagattatgtcgatattttttaccatcatcgcccagatccagacacaccattggcagaaacggctcatgcactggacttgttagtacggcaaggaaaagccctctatgttggtgtgtccaattattctgcagaacaaacaaaagaaatcgccaagattttgaaggatcaaggaaccccctttatcatccatcaacctcgctacaatatgtttgatcgttggatcgaagatggattaacagctgtcttagaagaggaaggattaggtgcgatcgtctttagccctctggcacaaggattattgactgatcgttatctgcatggtattcccgaagactctcgagcgcatcgctcagatagtccttttttaacagaagatcgtgtagctccaaccttaaatgtagtcagacaattgaatgatattgctcaagagcgaggacaaagtttggcagaaatggcattagcttggctgttgcgtcaagagactgttgctagcgtattgattggtgcttctcgtttgagacaactacaagcaaatgtccgggctttggaccaattaactttttctgctgaagaactaaaaaagatcgacgaaattttagtgcttttaaagaaataagcgtttgatttgctcgctggcctttcccatgggggaactgccccgcattgagtaaaatggcggaaacttcatttcaaacaacaaagaaatcaaacgaccgcagtgtgtattgtccagaagctattaatgcttcgatgcaataaccctcgcggtcgtttggttcttttttgctacattttagttgattgattctttttaccaatcaatggctaattgcaggcagcctttgatgccactttcattcactagttgccatggaacaatgtactcttctacacttggaatcgaaatgtagccccctagttccagcaaaaattgttctctgatttttgacagcaagtgggtctgattcatgacaccaccgcctaaaataatcttatctggtacaaaggacaatgtataattgaccaatgcttgcgctatataataggcttgcagctcccatacaggatgattttcaagaagagtctctcccttttgccccgttcgtgcttcgatggaaggaccggcagccagcccttcaaagcaatcctgatgataagggcaagtgccgacatatgaatcctctgggtgccgtttgatccggatatgccccatttcaggatgagatttgccttggaataactggttattcacgattacgccggcaccgatcccagtccccaccgtcagataaatacaggtatcgcagtcttgagcagcccctttttttaattccccataggccgctgcattgacatctgttgtccaaaccattggaatcggatagcgttgttttaacgtccccaaaaagtcaaaattttgccatcccgctttaggtgttgccaaaacatgcccatagttggcttgcttgggatccaatccgattggaccaaagctgccgatccccatcgcggccagctcatacctatcaaaaaatcggaaaatttcggccagtgtttctgcgggttctctcgtagcgattcgctgtgaagcaataatcttcccctcttgatccgctactgcacagttcatttttgttccgcctgcttctatgcctccatacatcattgtctatccctacttttctactcgaatatcgaaataatccattactagctcacaaaacatcatgtttgcccaagaaaaccattcacgagtgtaatccgttggatcattgacattgataccctcatgcatcaaatgcgttcctgcatcgatcgctaccaactgatctaaaatttgggctttttcttctttgtttggtgtcgtcaatccagtcatcgccatcgcgatcggccaaacaaaattatgcggtgtatgagatgagccgatcccactagcaaattcgccttgatagtaataaggattttcgtcacttaaaagtgtttttctcgtagctagataagttggatcttccatggagccatagcctagataaggtgcagaaatcaggttaggtacattgctgtcgtccatgacagaggcattgcctaacccatccacttcataggcatagatcgtttcgccagcttgattcgtcgtatacgcatatttttcgatccccgcttggatctcttgctttaaatcggctgcttcggccactaattcaggcacatctaaaatgtcggagaaaatcagttccaaataacctaatatcacaacagcgaacatgtttgacggaatcaaatagccatagacacaagcgtcgtcgcttggacgaaatcctgaccaagtcatcccagttttagcaactggggttcctttgccggcgaacttcagcgtatcttcttgacgttctgtttggcgctcaaattgatatggtgactgcgcgtgatcttgttctgtccgaaagacggttaggacttttttgaccccttcaataaagtttttatcaaagtgatcggtgcgccaggtgtttttataaagtagataggctaactggatcggatagcacaatgaatcgatctcatatttccgttcccagatccagccgttcatttcggttagatcatcttggtgtccggcaaaattttctgtttcattgaaggcattggcgtaaggatcgatagtgataaacataaattgctttttgactaatccggcaatcatatcagacagttcttgatcatcttttgctaaacacaggtacggacggacttgagcggttgaatctcgcagccacattgcaggaatatcacctgtcaaaacaaaggtactgccatcttcttgcttcttgacagtggttaatacggtattggcaaatgccgcattaaagttttccgcccaattttcatggtcttcgccacaaagcaacgtgattttctccataaaactcttaattactttcggtatttcgctgtatcccatcttcttttccccttttacaaagaagagccgacaaaagtagacaaagccgctggtctttctgcaacgagaagcttcgggtagttgatgttcaagactgttcaatcctccatcctatgcccgatttgctaagaatgaaccaaccttcgctgatctcgaaaatctgctgccagtcctttcgctttgtctactgatatttctcttcaaactttaaatgattgcagcactttctaatgccatgacccctgataattggtcagacaagaaaacactagttggaatttctgcgactaaccagtctcggtaagctaacagatgtccttccttctgactatgctctaacaagcgttcacagctggatgtcacaaatcctttgatggaggctatgtctaagcccactttttctgcttctttgactaagagattcaaataacggtattcaatgcctttgaacaatccaatgtcaccaccatctccttcatcattgaagaccccatctttaccaataacttcaaaggatgttttggcacaagtgattgcatcttttaaataagaaatatcgtcagtcacatgataaaattctatcaatgctccaatatagaccccttggttgtaagtaaatttccattgcacatcgattttgccatcgccattacgattgataccatcttctacgaattgtgtgtccggctgtaccaaatattttttcatccattctagtgtctgttggcttgtagtcagatagcgttcattggcttcaacttgatacagacgtaatgctagaataataattggtgcattcacaggtgtattcttatagtcaagctgcgtgcgtttccaagcaaatccgccattcatatgatcattccaagcagtatcaaaaatatccagacatacttctcgggcgtcagctaggtattcttttttcttagtcaagtcatacaaacgtaatccagctaatgcgttccacaacatgtcatcataaaattcatgcagcaatgtgttatggtttcttgctttattgtaatgataggtttcttctgcttgctgcaagtaagccatatcgttggtccgcagataagcatcaatgcgtacatccactaaatgcgcgatccaccagtaattgaaggtttcattttctttctcatcccgcaatggataaacgttgttcataaattgttctttggaagctgcttgatagaaataatcgatacttgtttgtgcaagatcggcatacttgttaaaatcggtcattctcctgatccttctttcaatattttgtcaccttgttgttgagcattttctagtgctttttgcggcgttgtttttccagaaaagacattttctaattgtggaataagggctagtttttcgacatcggaataccccataacagttggtcgaattttagcaaaatccatggtttccacaaaagctttgtacttctcattttcagtaaagtaggtattttgcgctgcttcgatatttgctggtagccaagtggaaatttttgcaaactcgacaccgatatctgggttggtcgtccaccatttaataaagtcccaagctgcttcttggtttttggccgttttgggaatcactaaaccaaagccacccgtcaacgcccctttgtccccatttggtccagttactggagggacgaccccataatccaagccattcactttatcataatctgctaatgcccaaggtccgttataggtcatcgcaactttaccagctgcaaatgcatcagatccatcattaaatccttgttgatagaccttcgcttgattcattaattgatcccagaaatcaagaatggtcattcctgcctcagaattaaaagcagtggcagtattatcagcgttcagcatggttccgccagcttgctgcaaccacatattgaacaatccaacgtcatcaagagaaaaaccagcttgcactaacatttttccatcccattttgttgttttcttcgcaacatccaacaactcatcccaagtctttggtggttctactccagcttctttcagtaatgttttgttataaaagagagagcggttgtctactaaaagtgggattccatattgtttattgtcgtattgcatttctttgacagtttcttcataaaaatcgcccatatctacattgtcttttttgatcaaatcatctagatccaataaggcattttttttggcatacatcgctgtattgacgcgatcccacaagataacatctggaatttcgccacccgccattccggtcagcagcttttcttcaacgttgtcttgaactttgtaggtcacctcgtatttgtcttggctatcattgtattgatcgatcaattgattgagctgatcgacttggtcaccactccaagaaccccaaaaagtgattttctgctttccgccagctccatcattgcttgcctgatcattgcctccaccacatgcacctaacactgtcatcgctgctactaacagcaatcctttgattatgtttttcatcacattcactccttcgttttatttgataccggcatctgccatgccttgtacataatttcgttgtgcaaaaatgaatagaactaaaacaggtagtgttgccaaaatcgttcctgccatcaatggaccataatttgtattgtagttgtattggaaagctgccagtccaacttggaccgttttcatttcatctgcattcaagacaatcatcggccacataaaggcattccagcctgcttgaaaagtcataatacctagcgttgtcaaagcaggttttgctagcggaaaataaacattccagaaaatcttgaactcacttgcaccatcgattcgagcactttctccgagttcttttggtaattgttcgaagaattgtttcataaagaaaatcgagaacgctcctgctgctccgggaagcaggattgcccaataggaattgatcaatcctaacccaccagtaccagttagatcattccctccagccaacgggaatccgcgaagcacaataaaggttggaatcattgtgacaatacttggaaccatcattgaagctagaaaaacgagaaagattggtttcttccctttgaatttcagctgaccaaaagaataaccagctaatgaaccaaaaaataaatttgtcgctacacccccaagtgctaatatcaatgaattttttaaatagtttaagaaaggcatcgtttcaaaaacttctttataatgatcccaagtaaagtggcttggaatgatttgcatcgatccgctgagaatctcgctatcggatttaaaggatgtcgacaaggtccagataaacggcagaaccgttgtcaaactgatcagaatcaccaagcaataccagatgaatgactgcatatgttttgttttagccatcgttttttctcctttagtttgtttctgtattggtcaaacgcatattcaccagtgaaaaaatgaaaatgatcatgaacaagataaatgacagcgcagaagcataccccatttctagtccaccaaatcctttattataaatatagtaaacaagggtgattgtggaatttccaggtccgccttttgtcagcatataggcttggtcaaatacttggaaagcgccgatgatcaattgtgtgctaactaagaatgttgttttggataattggggccaagtgatactcttaaatttttgccacgcatttgcgccttcaatatctgctgcttcataaagagcaggattgatcccttgtaaacccgccaagaaaatcatcatgtttccgccaaaactcatccagacactcataatgacgattgcagtcattgcccaattggaactatacagccaagctggaccattgattccaatcaaactaagcaactgattgagcaaaccatactgtggatttaagagccaataccaaatggttgctgtagccaccgatgaacataagactggcaaataaaaaaatgttcggaaaagactggtggtcttcattttgcgattcagcaacatggcggctgctagagagacgactaatcccaatggcacatacagtaaggtgtagacgatagtgttctttaaggaaataaagaaaaattcatcttgaaagatacgcgtgaaattctttaaaccgatccaattggggctttcaatgatcgtataatcggtaaaactatagaaaagtgccatcactatcgggataattgcaaaaacaactagtagaagaacaggaaccagaataaatacataggcaatgttttgctgttcattgatccctctctttttctttcctaactccatttattaacccccttattaaatataatataaagctatttaatatattaaatatctttacaagcgaattatatagaattaaaaagaatatgtcaacggtttcataaaaagtttttttgattaaactgcttgctttattaatataatatatttaatatatacataaatagttcttttattttttgagaaatggaggcgcatgcatgagtaaacctttgtaccaaacgatttatgaagatttgaaacatcaaatcgaaacaggcactgtcgcaatcaatgacacactgcctactgaaaaagaattatcaactacctatagtgttagtacgatcacggtcaaaaaagcactggatctgttaaaagaggatggctacattgtcagaaagcctcgaaaaggttctgtcgttgtcacaaataagaaggcagacattgttccgaacaaactcattttcggattgatcatcaccaactttacagacttttttggcgctcaaatactgcgaacagttctagaaacaaatactgaagaaatcaatttcatcgtcaagatcagttatggtgatcctgatcgcgaaaatgagttgatccaagaattgattgaaatgggcattcagggtttgatcctactgccgacatcatcagaatatacctcgccaaaaatcttagaattgatttctaaaaatttcccgatcgttgtaattgatcgtctgatggcaaatttgccgatctgcagtgtgcaaacggatagctttgctgctgcaaaagaattgacaaattatctctttgccaaacaccatgacaagattggcttgattacttccgatagcagtgtttcaacgattgatgaacgagtcaatggttttctctctgcgcatgtggatgccaaccgggctgtcagccaaaagcagatcttgtcgaggatcgactctgtggtccccagttcttctcgcaagatcgaagatgatgtggcacttatcgtggcctttcttcaaaagaacccagagatcacagctctttttaccacagaatacaatattgctttacttgccaagagtgcgattgaacaattgggaaggcaagtcccacatgacttttcagttgtttgctttgaccatcctaccgtcaacatttttgacttgaatgcttttattttcactcatatcgagcaagaccaaacagccatcggcaagcatgccattgatcttttactgacaaaaattgctcatcctgatacgattgaaaagatcaacctcggctatcggttgattgaaggagattccgttatttctagatgatcgtctgttcctctatcgaagcagtacattagcgatccgactacaaatagacaaaaaaacacacctccgttctgactcgctgaacgagtcagaacggaggtgtgtttattgggatagctgtcattctttaaactagacagtcctccttttagttattctcgatgactgcgacttcttttcttgtaggcatccccgtttgggcacctaatttttgaacagaaagtcctgcaccaagattcgctaaaacgaccgcttctttaaatggcaccccatcacttaatgcagccgctaagataccattgaaggtatctcctgcaccggtagtatcaacgacggtcactttctttgatgccacggtcacgattttaccggaatcaacgaaacttaccccttgactgcctcgtgtcactaccaatttggtagcgtgcgtttgctgccaagctagaatcgttgcttcgatttcaggttcagggatcaattctttaccgatcaatgcggcaaattccgtctcatttggcgttaagatatcgacataaggcagtaattcccctacgatatcatgataaggtgcgggattcagtagtgttgtcacgccattttcctttgcgagctgtaacgcataccgaagcgtatctaccggaatctcaatttgtaccagcaaaacatcgctttctatgattttatcagctatttgatctacatattcacgatctatcagtccattggcaccggagattacagtgatgcaattatcttgcggtaatttaaaaatacttgcgataccagtaaagatatttttttcttgtgcaactgactgaacatccagttgctcttcacttaagtgtcgatagactttttccccaaacgtatcttgaccaatttttcctaagaatgtcgttgttccgccaaaacgggcggctgcaactgcttggttggcccctttcccgccgacaaaataatcaatttgatctcctatgatcgtttcgccaatttttggcattcgcccagtcgtgataacaatatccatattcacactgcccaaaactgctattttacccactaaatcacctatttcttttgtatatatagaacgggccaaacgcttcgcgacccgtaacagaagttgtctctatcaaagaaaaaccggttttctcaaataagtgctgcatcggcttattcgtatggttggtcagagaataaatggcatcccctgctttacaaaagtctcttagacaagttttcacccaagccgagcccaacccattccccatttctgatgcttttgtcacgagcctttggatacattttgtatgttcattatacccatgactctcttcgtgcgccaaaaattctggactaagggttcctgcactaacgatttctcctgattcatttttatgaatcagtaattgttttttacagatatctgttttgacgatctccttatcagggtaactgcttgtccattggcagatcccctgtgtctccatatttttttttgcatcaacaaacaactgccaaatttcatccagttcttcattgcatgcatatattaacttatccatcaaatcaataaggcagtaacaacagcgacaagacaactactaggataattcctatgatcgtaggaacactggtccgtttcagcaaacgaaccggactcacaccaatcgatgacgaaacgatcatgacaactgctgcaactggtgaaatcgtccgcgctaagttagcaatcatttgcattggcagcgcaatcaagataccatcgataccggctttttgggcaatattgggaatcagctcgatcacagcatagaacatggctaatccaccaccactcaaaataccaaataacgctgtcgcgccactgaaaatcagtgtggttagaacaccggcagattgagagttttcaaccgcactcatcaaagaatcgatcacgcctagactttgaatcgctgtggtgaataaggaacccccgactactaacataacgacttggctgaaaccttgtcccattcctttgaacagttcgactgcactttcttgggcaatcttaaatgatttcttacggaacccttcaatgatcaatgctacgaagaatgagatcattgtcaaaacaaaaatgtccatcgtcacattttctctaaaaataccaataattccaacgataatgatcaagactaaaggtaataatggcaaaatggcataaaatgtcgggacaactttttcatccgccgcactttcaacttctttcatctcgacaaacgcttctgaaccttcctttttatcgcaatacgtttgccagaagtagtggacaacagctaaaataagtaaggttgggatcgagaccttcgcatgatacagcacataagtcagaatgttgtaatccaacgtttgtgcagcaatcacattgtctgctcctaatggtgttggcatgatcgttgcggtcattgcaatgacccctgctgctgtcattgatgaaattccaataccttgtaagagcggatacaaaatagccattaaaataattgctaaactagaggcacttggaacaactagagacatcaaatttcctaacaggaaaacaatcggtataaacaacgctttggatttgattttggtcattggcttgactaagatattgaccgctttttgattggcaccaatcaaattcatatagccggaatagccaaataaaatcatgatcactaatcctgctgagctaacttgtgagatgatcgtgtctttcagtttcagaaaaatatcaaagaaagccagaccagttccttctccttcaggatagagaggatttcccaatgccaccgacgcacctaataagacaatcgcaccgataatcaaaataagcgctggattataactcttaataataaaataaccaacgatacctaaaacaactaatactaaaattgcttcaatcattttttcccctcctatttacactgactgattgcatgtaaaaaccattccttgaatttattctcatcgacatcgacacagacacggcaattcttttctttgccaagtttattgttcagatcgatgatcgtagcgccagaagtatactccccttttgtttctactgcgacaaaggtttctttgatctcaaacatttccggacaaagaacgtaagctaaagcacagctgtcgtacatttttaatccggtaccaaaacttccacctcgatatttcttgaaaaggtggtacatcatatctccagtttgattcatgtctttgattttttcgctgtcttcaggataaaccagtgctttcaacccgacatctaatggtgcgactgctagcgaaagaccgctttcaaaaacgattttggctgcttccggatcaatcgcgatattgaactctgacaaaataccaaagtttcctctgcctagcgcaccacccattaaaaccaattcttcaattctttctttgacttcaggatgcgttttaagaagaagtgcaatattagtcagtggtccgattgcgataatcgtcatcttctctgcagaagccatcaatgtgcgatgcatggcttcaacggcactctcttccaataaacaactgcgatttggtgttggaaactcgtaccctgccattcctgttacaccatgaacatcgctggcatcttttacttcacgaagcaaaggtccagctgcgccttgggccacaggaattttcaagttccaaaaagtcagcaacttcaacatattttccgtcacatatttgatccctacgtttccagcaactgtcgtgattaatttcacgtctaactgatcactgaacaagccaattcctaatgctactgcatcgtcaattcccggatccgtatcaataattactgctttgttcataagtaaacccctttcgttttttgataaaacgttttatcaattggctaaaaataaaaacgtttgataaaacgttttatcatttgttctcccaaagaataccacttgtgtaaagcgctgtcaataacgaatacaaaaaagctatccataaatttgcactgaattctaacctagacaatcgttgtgttgatcagttaaacagctacgtcctgatataaacacaacgattacctttttcattctatctttgattccaaccgtttgccaacgcttttttttcgtacgatttttggcgtcaattgaagataacgcggcgcttgttctttcatcgctgataataaagaggtaactgctttttctcccagaactgtcacatcttgttcgacagaagtaagtggtacttctaataaatcatttaaaatcaaattatcatagccaacgatggacatttcttctggaatattgattcctaactccttggctcttttcatgatccctaaagcaatcaaatcatttcccgccacgataccggtgattgcttgattgttcaaaagctggtctgctttgtcataggcatcttcaaactgaaattttgtgaccacccgccagctttcttgctggggcagctgcgcttctttcagagcatccagatatccttggtagcgataaatacagttgatatttttatcggggttcatcataataccaatgttttgatggccattattgatcaattccatggtcgcaagatagccgccttgtcgattattataaaacacttgtccaaccggaaaattatccaaccctcgatcaaccagcaccaatggtacagaaatactgcttaaaaactctttcaactcttcttcgtaagtataagattcactcgaaagggctagtaacagtccatccacattacgatcgatcaataattgaatcaattctttctctgccgcaaagtgatcatctgaattgactaaaatcaaaaggtaaccaatttttcgcaactggtcttccagtacttttgctaattgtgcaaagaaaggattattgatgtctggtatgaccaatccgatcgtatttgttttgtttagcactaaactttttgccgcaatattaggcgaataattattttccttcgctaattgtttgatcaagcgttttttcttttccgagatgcgaatcggtttgtcatttaagacttgtgagacagcagcgattgagacgcctacttcttcagcgatatctttcaagcggatcttcactcttcttctcctcgctttcctgttttattctacgccagtccttaaggttcgtcctttctctattctatcatagctctgtttatgtaagacattcagagtcaaacgattggctattttttctgacatgagtatttggaattcacctacgtaaagagcgcctattgcgtttttaaaatacagcacccatgaaacataacaatgaccggacgttcttttgggtttcgagaagtccggtcctgttcttttacacgtttccttagtttaatcattcttagcgtgagtgatcttggttctaactaaatattaaatcgaacccaatcggcaaaaagctcgggccaacgaaccaccgagtcttcaatggcgtgttcgccaccactggccgtttctttggttccgagacttagaccatgcccacctctaggaaaaatgtgtaattcataaggaatgtcaaacttacgcagttgttttgcaaacaagagactgttttctgccggtaccagaccatcttccaatgtgtgccataaaaatgttggtggtgtgttgcgacttacttgcttttcaagggaaagctgcgccttttgttcgtcataacggtttcctaaaagagcacggaaagacccttcatgagcaaattcaccgcttgaaagaaccggataacttagcaacaacccatttgggcgccattcgtgattggctcctgacaatgtttctgttaaaaagtcttcttgccaaaatacgcccaaacttgctgctaaatgcccaccagccgaaaagcccgcgacaatgattttctccggatcaacgtgccactgtgaatgattttggcgaatcaattgaacgctcgcagcaagctcttgcaatgctaatgggtacacatggggtttgatactatagtggagaacaaatgcctgaaacccaaaactcatcatcttgattgctatgggttcagcctcacggtctgataaaaactcatagcctccgccaggacaaataatgattgccggtcgcaaccgatcctgctccatctcttcagagttgtcaatcacataggtagtaagcgttgcttcacttttagaaaacggttggatcacttcatggatcatagtaattgcctcatttcatgataattttgctaacaactggttctttgatttgtagatgagtatactagatttttagaccagctgtagttacttgtcaagtcaaggaacgatcaatggcgaatttctcttgtttttttcaaaggggctgccgacaatttgagaataggtatcccagatcgaaagtcctttgccccttcattccaggctccttcaatctggtacgcggcagcaatcgccccatgaaaatcccgaggaaaaagaatcccgtttactgtaagacctgttcataatccttcccagcaatcacaataaaacgattacatatgatcgtatcatattttcaatcatacataacagatttttgtttttttcataaaaaaactgtggcataagttgaacaaataattacccgatcagaagggtgtctcctgacgaaaatggtcgatttacctcaaaaagccataacttgctgacttctctggtagcaattaggtagttatctgtttcggcttatgtcacagcctatttcattaaatcaagtaatcattcaaacgagatttcacgtactcaatgtggctagattccagctccacttgatcatgtgccaatgcgtaatccgttaagctttcaagatcctcctgatctgccacgatctttgcgccgatccctacgttaaatgaggcatagcgtttttccttcaattcatctaagaaacgatcttctttgatttttgctgcggctttcaatgctcgtgcataggtatccatcccagcaatatgtgccaatagcaagtcttccatttcaaaagatgaacgacggactttggagtcaaaattgatcccgcctggtgcgataccgccattttccaatacttcgtataatgccagcgttgagtcaaaaacattcgttggaaattcatcggtgtcccatcctagaagcatatctccttggttagcatctaaagatcctaatgcattatagctacgagcaacagcaatttcatgttcaaacgtgtgcccagctaaagttgcatgattggcttcaagattcaacttgaagtcgccttctaagccataatgttggataaaggccatcgtcgttgcggcatcaaagtcatattgatgtttcgacggttcttttggtttaggttctaatagaaattgcggtttgtgaccaattttttctccataagcaattgccattttaaataggcgggcaatattgtcttgttcgaatttcatatctgtgttcaacaacgtttcgtacccttcacgaccaccccaaaagacgtagttttcaccgcctagttttttagaaatatctaacccttttttgacttgggcagctgcataggcatagacttctgcattgttcgttgaagcagcaccgttgttaaatcgtgggtgagaaaacatattggctgtgttccataacaatttgatgcctgtttgatccatcttttctttaatcaggtctgtgatcacatctaaattttggaagaactcctctaaagtttcaccagctggtgctacatcaacatcatggaaacagaagaattcagcgcctagcttctcgcaaatttcaaagaatgcttctactcgatttttcgcggtttccatttccgtttcaccgaaccaagtgcgctgattgaccggtgctccgaaaggatctgaaccatcttgtgtcatagtatgccagtaggcaatcgcaaaccgtaaatggtctttcattttcttgcctaggactacttcttctgcatcataatgccgaaaagcaaacatattggccgtttctggaccttcatacttgattttatcaatcgttggaaaataattcattttggttcctccatttttagttttttaacataacaaactaacttacttctaaaataagttacatgaaacctttagtagtggcgattctttcgttgattactctgactgcaatgctgccaattcgcgacaaagaggtgctgtttgttgatacactttatgataaacagaatagatccgttgatactccgttacattttctgcgattggctggattactgacccatactttacaaaagccttcacacaagccgcttcgtcaggataaagtccgcttccgattgccgctaacatcgcggcccccatgccgggaccttgctctgtggataatgttgtgatctctgcagcaaaaatatccgcctgcatctgaagccactctttgtttttcgcacccccaccaacagaaacgattttgctaaatttccgttttgcttcttcttccatgatcagttgagagtctttcagagaaaaagtgatgccttccaagaccgctcggctgaaatgccgacgtcggtgatgggtatcgatccctatgaagcttcctctgacagtgctgtccgtataaggagttcgttcaccaacaatataaggggtgaacagcagaccatctgctccgggagaaacctccccaatatctgctagcaattcggagaagtctactccttctgcgaatgtatctcggtaccaacttagtgagttaccggcagctagtgtgacacccatcgagtattgtttttttgccactgcatgattgaaaacatgcaatttcccttggtaatcaacgttctgcgcttcaaaagataagaatacaccgctagtaccgatcgataccatcccaatgccttcgtcaataatcccagatcctagcgcggcacatgcgttatcggcgccgcctgcaaagattttgacttctttttcaaagccaaattctgtttgtaaatcagggaccagtgtcccgacttcagctgctgattcaaaaagtgtcggtaagatttcttctggaatagcaaacttgttgaggatttctgcagaccaacagctcttctcactgtccagtagtaatgtcccagcagcatccgaataatccattgaataggtacctgatagccacaatgctaagaaatctttcggcagcatcaagtgctggaccttctgccagttctcaggctcatgttcttgaacccaacagattttaggtaatgtgaatccttctagtgcaatgttctttgtgattgaaagaatctctggcatctcttccatgattcgctgacattgcttcgtcgtccgaacatcgttccacaaaattgctggtcgaatgaccttgttttgttcgtctagcaagactaaactgtgcatttgtcctgaaaagctgatgccgatcaattctttgcgcaactcaggcactttatcgatcaacgctttgataactgcatgagccgcttgacgccaatgattaggatcttgctcactgaatccaggtcggggggacgacaatggatagtctgcactagcagtgttaatcagattccctgagtgatcaaaaaccaatcctttcaaagaactcgttcctagatccagtcctagtaaataagccatattcttctcctttgctactgatgaaattcttatttgttatggtttacaaaatattgcttttaggttaatttgcttaaaaaactaactaattggatagtaaacgacccatccatttttgtcaagcgctttcaatagttatttgagacttttttaagcacctaactgaggaatatctccttttacagataaacttgcactttattaatttgcacggtaaactaacattactatagacgaagaaggagatactatgattattaacaaaatgggcatccgagagcagaatgaagctgccgtcctgaaaaccatcattgataacgaacatatttctagagctgaagtttccaacttaacgaatcttaacaaagcctctgtttcgcaaataatgaaaaaattgattgaaaccgattttgtcaaagaagtaggaattggtgattccacatcgattggcggacgcaaacctatccagcttcagttcaatcatcaaagcagcttagcgattacgtttgatattgggtataattatgtcaatggcatgctatcttatatcaatggtcaacgaatagccattttggaaaaacaagatatcttgattacaaaagacaacgtattcaccacgattgattcgataatggcagaatttacccccaagatgcctcctactacccatggattggttggtatttgtttagcgatccacggtatcgttaatcaggagaacatcacttttacaccctattatgatctggaacacattgatttggtctctccccttagtcagaaataccataccgcagtctatatcgaaaatgaagcaaatttgactgcattaggagagtattgcttttcgtctgattcaactaatctgctcagtgtcagtattcatagcggcatcggtgtcggcattattgtaaatggacgtttacagacaggaactcacggaacagctggagaagtgggtcattctacattgttccctcatggaaacctttgtccttgtggaaatcgcgggtgtttagagcaatacgcttctaataaagttttattcgatacctacagtcactatacaaaaaaagagcttgtcaattcagatatttttgcaaaggctattcgttctggcgagaaatcagcgcttgaactagcacaacaaaatgtcgaatttttgagtatcggcttaaataatgtcattacatttttcgatcctgaagaggtttatatcaacagctctgtctatcgcaaaatccctcaattgaccaaagacctgcaacaaaaattaaccagtcagttcactcagaatacgaaaatcaaaaacagtcgtttgggcgaacaggcacctctgttcggtggtaatgttctgattgccaagaacttcttaaacattgaagatctgcgctttccaacgattgatttcctttaatccataaaaatttttttctgatacagaaaatccactcattcatttagccaccgtataacttcaataagtggcaacacaacaaatggactggggcataagtttgggtagctgactgtcgctgcgctgcaggagtactctgtgctcatgcacaatttcatacgtgttctcctgtcagatactttggttctcattctttatttttccttatatcctacagtgccagcaagacaatattgaacccccctcatcaatcccttctcccagcggcttactcttttatgtctcctgcagtgatcccgccaacgatatatttcgactgcaatcatttactcctattcaaaatcaaaaggtctattccccttctaaaaaaggaatagacctacaaagtcagaattgcttgaattttccccattgcttttgatcattactcatcttggttctttagttttgtcttttttagtcttgcccttattggaaggcttgattttccttctgatacaaaaagaccgaatagcgttaacgtcacgcctagtagtttcactaaactgatcccttctcctaggataagaaaagaagcaaataatgtcgtcacaggaaccaaataaatatagaggccagccataacagcacctagctgttcgacggtgtaattccatagaacgaagcacaacgcggaagcccccagtccaagaaacagcagataaagcagattgtccgtttgaagcaatttatctaacgaaagggaacttttcgtcaaaaagaacagcggcataataaatagaatgccatataggaagatcattttcgtcgtgtcgatcacggaatgtccccaactagcgatctttttgaccaacagtgaatagaccatccacatcagggcggctgctatagctaaaaagtcgccaaagggatgaaacgaaagatttcctgcaaagctgatcagaaaaataccacaaaaagaaagcaaaaaaccaataaagaatgttccctttaatttcgttcgataaatgagagcagaggctaagccaatgaagagtggagaaatggaaacaatcaccgcaacattcgatgtacttgtataacttaaagctatgttctctaaaaagaaataaaaacaaacgccagatattcctgctgccatcaaataaagatgttgacgaaagtgatagtgtatcctgctaaatttggataacacactcaacgccactagtccgatgataaatcgtaaaaataatatcgccgtgggtgaaaaatcaatcagcagcagttttgtggcaataaaagttgttgaccagaagaaaaccgtgatcaaggcagtgacatggggattcttaaataaatgattcattctgtactccttaaatacattttttgatattgttttggtgtcagcccaataaagcttttgaatacattggagaaatgactttgatcggagaaattcgtcatcaacgccacttctgataaggactgctgttttgccagtaatttctttgcttcatcaattcggatcgataacagataccgataaggtgtcatgccatagttttttgtaaattgatgaatgaaagaactttttttcaaattcgtcaacgcaacgagattctctaaacgaatgtcttctgtataatttttttgtaaatgatggcaaacattttctaacaggacattttcaacgggttcattctgatacccttctgctgtataggcaagtaagttttcaataagcaaatacatcaattcctctcgatatagaggtgatttctttgaaagaatcgcttggtacaattcttcgactagttctcctgtgctattgtttcgcaggatgacttgactaaaataaggcagatcctttttgccggtaatttcttttaccacttgtgtcattgcttgcttggaaatgttgagggcgtggtaggtaatttcttggttctccagactttggcagctatgaggctgatagggattgaataaattcagatcgcctttttcgaggatttgtgtctctccgcaatacagctttcttcttcctgctaacaaaatacccactacataataatcatgaaaatggaggggaaagctcttttgatacttttctaacgcataggcctcaatgccaactatttcatcatagtgaacctttttcatactgttcctccttttctatctattttagcattgaacctttcgatttcttgtaaaatattccatgcttttctcggaatcaacctacatttaacctttccagaccctatttatgaaccaacgaaaaagcagataaaagaaagatcgcctttcctctatctgctttaattgtttgatccgctcttctagtttggatttaccagacattttataggcgcacgctcacggaaaaatcatccctcaaagccattattgtcagagacttgcttgaaccaatatcctgatttcttgatactccgtttgcggtcattttctaaatcaacagaaataaagccatatcgatttttgtaagcattggtccatgaccagttgtccatgcaggtccacatgtggtagcctaggcaatttgccccttcttgaattgcttgatgaacatatttcaaatgctctgagacaaattcaatccgatagtcatcatgaatcatcccatcttcacctaagaaacgacgttcattttcaacccccatgccattttcggagataaagcacggcaggttgccatagttatcccgcaggttgatcaggatatcgtaaatgcctttttcatagatttcccaaccacgataaggattcatttttttgcctggcatatcatacacatcaaaataattttctggcattggctctgctgcaggatcgacaggcgtttctttcgctttgatccgccgtggctgataatagttgacccccaacaaatcgacagtattatttttgatgatgtcgagatcgctcgcttgcatctcaggtaccatgtctaattctttcacgattttcaccagttcttctgggaaaattcctttgaccgcaggatcaagaaatgaacgattgaaaaaagcatccgcgatttctgctgctcgaacatcttcgggattattactgtctcttggataacttggagttagattcagtatgatgccgatttgaccagtttgcccactttcatggtaagccttgatcgccaaagcggaagccaatgcttcattaaatccgacttgaatggcatgtttcatgttactttcttctggataatgcaattgatacaaatagcccgcctcaacaggaacgatcggttcattatgagtaaaccattttttgactttatccccaaacaagtcgaaacatgtcttggcatatctggcatatgcctccacagtctctcgctggagccagccgcctttttcttgtaatgccattggcatatcaaagtgatacagattgacaaatggttcgatcccattgttgatcaattcatcaaaataatcattataaaaagaaacagctttaggattgactgcccccgttccatcaggaatcaaacggctccattgaatcgaagtccgaaaagagttatggccggtttcaaccatcaattggacatcctctttgtagttgagatagacttccgatgctttgtctggacctacttgatcaaaaaatttttccggttctttggcataccagtaatcaaaaatattctcgcctttgccgtccccggctacccgaccttctgtctgtgggccgcttgctgcggaaccccaccaaaaattttctggaaattgaaccttcatgtttctgctcccttcggtaatcctagtaattgattttccattaagaccacttgtttttcagtggccgcttttcccattttgattcgttctaagacaagttctgcggctttctcccccattttttctgctggcggattcacagttatttgcggcaacaaactctgttctgcttcagaaagataatcatagtgaccaaaggcgatatcttttccaacgatcagtctcttttgattgaaacattccaaagcccccactgacatgttgtagttactgacaaaaattgcagtcgctccccatgcgactaattcttcagttccccgataaccgctttgtcttgtgtagtcccccaccacgattttcatttctgcttcattgtttgccatagcagcttgcgcaccaaacagtcgttctctcgcagtgtgatccgactgtggagcggaaagataaccgatttttttatgtccagctgctaaataatggttgatgacgtcaaaaacactttgacggtcgttcaataagagaacatcggcgattccttgtgtctcaggatgattcaaaaagacaatgggtatctgaatgtcctgccatttcgacaaatcaaactttttttcatcagaaaagaaaacaatcaatccgtcgacagcatgctgcaataaataatcgagtttgtcatggtcctctttgctattcgtaaaaccactcagcaaaatactatagccattttcttccgcgactttctcgataccagaaacaacttccgagccaaaacgactggagatgcgattcatcaataagccaaatgaatagctacgattgttctttaaacccttcgcaataatattctctttgtagtcaagcgactcaatagcagcagcaatcttttctctgttcaattgtttcagctgatgtccattcaaatatcgggaaacagtccctacagaaacacctgctaattgcgcaacatctcgaatcgaagccatgtttctcacctttctctgatgccatttttcacgatccattttctaatgattatgaatcgctggattcattgatttgcttttggtaacgagtgttgatccccttcacgatctaataaaaatcatcagcttgttaaaaaattgaaccggttcaattttaaactatagcacgtttctgtagaattgcaatcttttttttggatgcgtattcattttctctttccactaaattccgaaaaaaagaaaaagatgaatggtctgcaagatgtctcaagagctagtcagcaccattcatctagattaaaccaaacaatgtcccgcttatccaagtaattgattggctagtaaaaagtctttgacttcggttaaatcagtaaaacgccgaacaccttgaaagagcgcctctttgtcgatgattggttgtttgctcaatgggtatcttccttttcttgtcggtaagtctgtcaaatcatcttcgaccataaacgctgagatgcccgctttttcagcagcagctatcccggcaaacgagtcttctaagactaaggcatcttttgggagaaccttcgcctgatgacaagccgtcaaaaaaatttccggatcgggctttccttgcttgacttgatcgccagctacgatgatatcaaaggtagacggcatcttttctagctcaaaataggtggcgattttttctcgggaagaagaggaggctaatgcgatttggcaggtgtgctgcttcagctcctttagtaaatcgagcaaacctggctttttgtagactcttttttcttcggctaaaatggcttctttgtatcggttcatcgaatcccgccattggtcgacagggacatcgccgtacaactctttcattccttgacgaatctcggcttctcttttcccggtcaaataataatagacatcgtggatcaattcaaaatcgtgttcttcagcagattttagataggcacggtaggcaagtcgtcctgtttcgaacattaagccatccatgtcaaaaattactagttggattgtgttcattcgctttctcctactttattttaaaaaagagccatgcgtctagcattagatcgcaccgctcttcgttttgatactcaggtcgattcaaggattgcttttaaggatgctaaatgtgcatccccttgctcataatctctgaccagctcttctgaaaggatgaaagaacccccaactgcgattacttgcggatgagcaaggtagtcttggcaattgtccttagagattccgccagttggcaaaaatcgaacatcatagaagggaccgcttaacgctttgattgcttgtaacccgccataaatatctgctggaaaaaatttcacagttttgatcccaaacgatacggctttctgaatatcatttggtgtcgctgttcctggaaaaatcgggatctgattctttagacagtgatcgataacttctggaacaatagctggagagacaataaactgggccccctttgctaccgcttgttgggcttcttcaagtgttctcaccgtaccggctcccacgagcaacttccctgagcgtgctaagtgttcgattgcttttaacgccagttcgctgcggaaagtcacttcaatcaaacgaatatcatgtttaatcaataattcttctagtggatctagcaacgacatgtctatggcggtataaagcggtaaaactttcgtagccgctaaatgttcggtcaatgattcgacgtttgccattctattcccccgctttctgatcaatttctgcagacatttgcgatttgacaaccgcttcatgcagtccttgcaagtaactaatccccaaagctcgatcatacagaccatatcctggcattgctacttccccccagatcgttcgcccatgatctggacgaatcactccagtaaatcctacatccaccaaggctttcataatggcatacatatctagtgaaccttctgtagacaagtgtgcagactctttgaatttgcggtctcccataaagagaacgtttcggaaatgtacaaaattaattcggtcgccaacctcatggatgatcgacactagttcatttttcggatcggcgcctaacgaaccagtgcatagcgtcaatccattataaggagagtcaacaatagacaatatttttttcaagtcagacaagtttttggtgattcgcggcaagccgaagatctcccaaggcgggtcatccggatggatggccattttaacattcatttcttcgcaaacaggaataattcgtttcagaaaataagccaagttatcgaaaagaacctcttctgtcactccgtcataagtctccatcagctgattgaatttctttaaccgttcttcttcccaaccaggcagcttgaatccttttgattggctgtggatcaatgtgtacatttcgctaggttccatcccatcaaccactgcttggtcatacagcaatgagaaactgccatcctcattttcataaaaaagattggtttttgcccaaccaaaaatcggcttaaaactataacaaatcagatgtatgccacaagcagaaagatttttgatcgtctgaatgtaatgatcgatgtagtgatcccgttcttctgttcctgccttgatcgcgtcatggatcgccacactttcgattcctagtaatgtcagttcttctttttcgattgattgttttaattcctcaatttcggcaatttcccaaatatctcctggcagtttgtttaacaaggtgccgatgaccccattgatgccaggtatttgacggacattttgcaaaggaatcgagtctccttcgccataccatctaaagccccatttcatagtcaacatcctttcttaaaaatcatcatcgtcatcctcatcgccagcagctggcgtctcattcgagatatgccaaaaagcaacactatcttctccttgatcgatcactgcttgtgccgctgatgcaattggtgtttgcagtaattgatgattgattgcttctaacaccatcggcaagttggtaccgccaataacgtaaacttcttcttgcagctctttttctaactgattgatcgtcaaaactgactggttgtaagggctagcgctcagtaagtctactaagatcagcaccccttcttgttgattgacttgatgtaccgcggtactgattttttctcccagtgcttgaacatcatctccttgatacaaattgactgtcgctatattttcgactgctcccatgatgactgttgccgcatctttcagtccatcgcttaatgtgccatgagtagcaagtacgattcccaacattgtcattcctcctttgtctccctgcatggatttccatgcaaaacgtttactgtaacaaggcaatcgtcttgtttacattttccatattgatgtctttttgccttaataattgtttaggcagataatatccctctgttgattccttatttccgctgatcacataattgattgttgcatggattccttcttcttgaaggattccgagtcgtgctaattgtttgcgatcaaactctgttcctactacatgtagaggtgctttggcaccaacagaatccagataataaatcgtagccttgcgtttggctgagtctcgcaaaacttctaatcctcgttcgccatagcttccttcatccaagaacgcaaacgcagtgttttgtcgttcattttcactgattaaagccaataatgccaaaaccgaagaagtatttctcgttaagtttttctggaagaccgccccttttaccacttttcccaataaaagaaagtacgaaccaaatgccagaactaagaaaaatgtttgccaagaaaaaagtacaaaaccgtcagcagcaaattgactatagaaccatgtcgctactgcgccgatcccaatcgttatgaatgagctgacaagaataaaattcattgtttgacgaccttgcgcctttcgatcaaaaaaatgataagcgccaaaatgttgcggcggtgtatcataatacgtacaaatgattcgatctgcttgagcaatatctccgatgtaaacatttctcgaagctgctttatgtttcaaatcatattcgattacgcgaatatcttttcttatttgtgagatatctgtcactaaagcatttaggaatctttttttgctgcggtcacttaagcgagaacgataaatatagcggtaacgaaacagccaatcattgaaacggtctttctgcatctttttcatctcccattcttcgaaggatccagcacgttttcaacagcctttgagctagcaaccatcaaatgaccgttgcttttttgttattgatggaactagctcagttgctgtatttggcagttataatccgaattgtttcaagacctcttttaaagaggatttaggagcagaaggtgttgcttggaaatagatgttttcgactccatagtgttcattcatttcctttaatcttgcggcatctgctttattcaagtagacggattttgtgactaacagatctttttctggatctttctgtgcgatcccgccaatgttcaactctttcattggcacaccatgggtgaccagatcataaatcacactgatggtttttgcgatcaggatgcagttgtactctttaaacgcatattcatcccaataaaattttgctttttctggtgtcacgacaatcgttttttgtcctgtgcgactgccggcatttttgtatagatctcgcatgaatttatccttagcaaccacttcatcaacgacgaagatagagttgaccccgcttttttgagacaacgtcatcatgacttgcccatgaatcaaccgttcatccacacgtgctaaatttactacacccattgttttccacttccttttctataaaatccctacgccggctagaatgatcaagatcaaagtcagccagagcagtgcttgcgtaacttttaagccttttttcgtatagaaccaataaacacccattacaacagccaatggcaagatacctggaacaatctggtcaagaatatcttgaatgataaattctcgtcctgaaatatcaaatttcagcgaagaagaaacattgacatagtttccagctaagacccccatcataaacaacccgagaacagacaacgtttcgattgctgtctgaacaccggtgctttgcatcaatccggtcgcgtttcgtcccattgcaaaagcttgtcgagcaaaaaatacacctaaaaatgcttggtataaagcgaaacagacaaatgggaacaatgcacctagcggacttccctgctgggcccatgggacagcgatcgcaataaagatatactgtactgttccagaatcgatcgcatcaccgatccctgctaaagcaaaagcacccatcaaccctgcttttgtgttgtacatcaaatcatcttgcatcagaacttctttgttttcatgttcttcttctgcccgctgctgttccatagaagacatcaggcctgtgatcacgccgcccccccagctcaattgcgtgttgaaaaagagcagttgccgcttataggcagccttgagggcgtcttcgttcttatataattttcgtaaaatcggcatcattgcgtataaaagtgacggtgccagatagcgttcaaatgaatgagggatctcgttggcaaagtgccagcgaagatatgctttcgtgacatctttttttgtgatctcctctggagcgatctgtgttgctttcactgattctgtcattttttccttcctccttgtttcttagaatccatcatcgtaatcgtcctcatcaaaggatgcattggacgtattcgtttcagcagctggagctaattttcctttttgtgattgtacaaagatcaatgcgatcagaacaccaaagattgcgtaagtaaccatagtgatttccaatgatttcagtacgacactcataaaataggcaaggaaaaagaaaaccatgtaatctttccgaccaatgacataaacagtcgttgcaatcccgatcgctgccaagccaccacctactacctccagaatatggatgacgacagtcccttcaagggcattgatgacatcagcgatcagtggtgcacccagataaagtgcgatgaaaacaagcggtacaaataaaataaatgaggccaacgttggatacaaaatgatcgaacgagtaattgcttttgtattcatgtcttccactgctttatccgtatatttccctaaaaatgtattgataaagaaccggaactgatacaaataactgcctaaaagtcccactgggacagcaactgcgatcgccgcttcgggcttcagattacctaataatgctaccggtacagcaatagccgcagcaatcgatggttcagctggcattgagccgccgggagagaagacccccatataaatcatctgtagtgcagcagtaacgatcatcgcctgcgctacatcccccatcacgatcccaacaaccaacccagtcatcaatggcgagaaacgaagggttagtgttgccccaccaccaagccatctagacatgactgccgcaacccataaagcaatcagtaaactctgtgtaatgcttaaagtttccatttttcctcctcctaaacctgctcgatatagttttctaaatctaaaagtgcttttttcagccgttctttcgttatagaaaccggaatcagatgaactttctcttttgaatcaacaaatgccactaactgatcgatcacttgcgggtcttctggatagatccccatttgatgcagggacattggcaactgcaattctcgataaaacggcaataactgatcaatgaccgtccatctttcttcaatcgctaattgataaaaaatgccgtaagcaactttttcaccatgcaaaaactgatgacttgctggtagatatttgctgattgcgtcatgcatcgcatgggctgccgcattgcgggcgtatttgtcacccaatccaccaactaaaccggcaactgcaaacacaatctctgacaagtgaatgaattcttctgttaccttttgctcttccatatcttggattgcttgttttgactgagatacaatcgctttctcgcatagtttggctgtgtagccagccaattgtagaaaaggctcatgttgaagctgtggttgcgccaaaattgtttctgattcataccactttgctaaggtatctgctagtccagcaataaagtaggaaactggcgcatcaatcactagtgtcggatctgtaatcaaaaaagctgcttgccgcaagaagtgctctgacattccttcagattcgccgttttctttatacatcacagctaacggtgtccatggtgcacaattacttgctaaggttggcacgacaccaaatggcgtattggtcagatgggctgcgtacccgaccaaatcggtcaattttccgccgccgacaccgatgataaagtcaatgtgatgtgcttctacttgatctttgatcaaatttgcaccgtagtaactgcattccccagtatactgatgataaaaaacatcctggggcgcctcgttgataaaagtcaatttgggttgcgctttttgccatgaaatcgagccatgaacgattaataatcgtttggcttgatattcttgcagcagctctggaatatgggctaatgcaccttcatggtaacgataaaactgaggaccaacttttacttttaaatcagttaacatttccttccctccttatgagaaaacaagaaaatcgctttgatcttgaacagctcgttctggtaattgcccttgaatgatctgttcgatgtccgtcacacatttttctcccatctgttcgagacactccattgtgtaagcagacgtatgaggtgtcatgattacgttatcaaatgccaggtatgggtgatccttgcgccccggttcttcttctaaaacatctgtcgctaagccagcgatcttcccggattttaaaccgtttacaattgcttgttcatctaaaagtgctccgcgagcactatttgacaaatatacttggtctttcattttttcaatttctttggttgaaatcatatgataattttcatctgtcaaattggcacacagacaaatgatgtctgaacgagtcagtaactcatctaactcaactttcctcccgccataactttgtatgtggagtgctgattgatagggatcataggctaatacctcacagcgaaacccattgcgcaaaatctccacgacacaacttcctgtgttgcctacacctatgacacctactgttttattgaacaatgctcgcccgacgaatttggctcgtgactcccattgatcttgccgaactttcacagatgactctacggtacaccgcaaaagcgccaacagattcgtcacattattttctgccaccgcatctcgttccaccaatgctgggatgatcgaaacgatcgtttgatggttacgtgcagcttctagatcgatattgttgtagccaataccatgacgagtgatcaataatagctcatctttgtgttcaaaaaattcctctgtaaagtgaggcgtcacactggcgatgatcagattataaccttgtaaacgttgcgccaattccttcccggaaatgtcactttccacatcaaaatgagtcactgtgccgattttttcgagcctctggatatgttgaggaaatattttgccaaaactactagagttgactatcgcaatgttatactcaagcatcctaagtctccttcctttattccgtttttgttacgatttcgtgtccgccaaatccatttctcagcgcagacaccacttttgctgagaagctgtcttgttcttgtgataaatttctcatgaaaagacttaatgcaattgttggaacggcaacgtccatttccagtgctgtttccaccgtccatttggcttctcctgaagcagcaacgataccccgatattcttctaagtgggggctgttggaaaattgtgcttcggcaatctccatcaaccagctgcggattaccgatccgtggttccagacatgggctactgctgctaaatcaaaagcatactcactctgctcaatcagttggaacccttcaccgattgcttgcatcatgccatattcgatcccgttgtggatcatcttcaagaaatgaccgcttcctgatgcgcctgcataaagatatccgccttcaatagcaacatttttgaatacttgttcgatcgaatgaaaggcatttaagtcgccgccgaccatcagacaagcattcttgcgcgcaccggagattcctcctgaagtgccgcaatccaaataggcaacctctttgtctgaaaattgtttccctcgtcgaatcgaatctttataatttgaatttccaccttctatcacgatatcttctggtaaaacaagtggcagcaagtcttttagtaccgattctgtgatttcccctgctggcagcatcagccagatgactcgtttgccagtaaatgaagcgaccatttggctgatagtctcatatgtttctattccctcccttcgtgcagcaagtcgtgcttgttctgaaagatccagccctttcgttcgatagccgtgatcttttaaattgcttgctaagttcaagcccattttgccaagaccgataataccaatctccatgatagcgcctccatttctatcttcattatacaaaaaaatatttttttgtaaatataaataataaaaaatattttttatttgcatttctttggaaatcgttgtactttaaaaatgaaggcttcggaatgtattgaaaaaggagaaaaacactatgactatatcgattcgcttaaaaatcaagaccctctataaagacttaagccccaaagaacaagcaatcgccgattacatactcgaaaaccccagtaaggttagccatagttccattagtgatttagcaaatgagctaggaatggcggattcgacattttttcaatttacaaaaaaacttggttacaacggttttaaagactttaagatggccatgttgatgcaagaaaatgatttatccgccatctctttccacgaaaatattcagcaatcagataacgagctgaccatggcgcgcaaagtctttgattccaacctcaccacattgaccgatacgcgaaaactactgcaagaagaagatttgaaacaagccgtccaaatgatcgacagtgccaagcgattgttcttttttggcgtaggcggttctgaaatcgttgcagctgatgcataccataaattcttgcgctcaccgatttctgtcgttcacagtgcggattatcacattcagttgatggaagcagcgttactgaccccagaagattgtgccctgttgatttctcatacgggtaaatcgaaagaaacgattgaacttgcgcaagtcgccaaagattgcggcgccaaagttatcgttattaccagtcacgcagcatctccgctagccaaattaggggatgtcgtatttatttctgtttccgaagagatcgaatttcgttcagaagctcttgcttccagaatctctcaactaagtatcatcgattcgctctatgtgattttgatgtttatcaaccgcaacaaatcccaagactccattgcgaaagttcgacgtacgatttctaaaatcaaagaatagccttctttaaatagcgtagcagcctaatctttaaaacctttcaatcatgtactaatgggttatgaaaaagtaatttcctctgctctcctttctttggacttcagaggattgatggctagtctaaataaaaaccaaagctaacgactaaagttctgataccgtctaagcacaagcgtgttcgatttttagtccatgataatagaaaaaagcagactgtctttcctcatagaaaaacagtctgctttctcttgttaaaaatcctcacaagtcgcgatgatcccttaagcgataaccgagaccaatctcagtgatcaagtattcgggactgatggtattggtctcgatcttttttcgtatatttgacatattgacccgcaatacttgcggatcagtgccataaggtccccaaacttctgtcgccaacgtttggtacgttacgactttgcctagatgttggaacaaaacagttaaaattcggtactcatttttggttaaatggatctctgttccggccttagtcaaaagctgcctttcagtatcaagtgttaattcaccattcttgatgactagcggcattggctcttgcttccgatgcctgaatgctgtgcggatccttgcaagcaattcattcataccaaatggcttggtcacataatcatccgcaccaagatccaacgctttgactttctcgctttcattgctgcgagctgaaatcacgatcaatggcaccgccatccgtttgcgaatgattttcaataactccatgccgtcaatatcgggtagtcctaggtcaagtaaaatcaagtcaaaggattgttcctgaaaaatcgtcagagcagccattccagtctctgctactcgaatatgatacctttctttttctaaaacgacttccataaaatcggcgatcgtcggatcgtcttcaatcagcaagacagttcttcccatgatgcccacctccagttaattcaaataaatgcgtacgaccgtttgaccatctgctacggccatctccaacttgccatgatgggcatgaacaatggttttgacgatactcaagccgatgccgagaccattttttgagtctaccggcacttcattgtctgaagacagatttgattggatccgttcaaactgcttcatcgatatttctccggtattttttatttcaaataccgttttcgctccttcttgaaagacagacaagtaaacttttcccgaatctgaaccatgacgaaaggcattttctaccaaattaaaaattgcttgttccatcaaaatcggatctacctccacgaacaggaccgattccggcagctgaacgatcaactctttttccggatagacttttttggcatgttcatagactgcgccaatgatctcttcgattggttctggggttttcttgacttgcatcgtatccatgttgatacgagtgatcgaaagcaaattctccaccatgcggatcagccattgggactcactttggatgtctctcaataacttgctgcgagtcgcttcctttaaagagttattagtttgtaagagcgtctccgcaattcctgaaatcgccgttaaaggtgtccgtaaatcatgagagatggcccgcaacaaattgctgcgaactttttctcgttcattttctaattcaattttttctttttcatccttcaattctgtttgttctaaaatcacagctaactgggtcaacactaagcgcagataatttagttggctgttctcaagtggaaaattacggcttctgcgaatgcctaaaacggccaatgttttgctattggcaataatcggtaaataaaatccctttgcaccacttaatgtatcggtcccatagccagactctttctgatttttggcagaccaataagcaacagccgcttcttccggatgactcaatgcggattgtttttttgcaccatattggctttgtttttgcgcttgtgcatcatacaaaatcacttcgcgatctaacaagcgggccagataggtggctgacaaatcaaaaatctgctgccggtcttctgctagaacaaattgcttgttcaactcataaagtatttccatctgctgttctttttccattgaatgaacagcttgtttttttaaacgaaccattagattactgatcattagtgcgacaagcagcatgatgactaacgtaatcggataaccttgtttatagacggtcaaggagtacagtggttcaacgaagaaccagttgaaggctaggacgctcaggatcgaagaaagagcgctccagaaatagcctgaagttagacgcgccacaagtagaataaaaaagatatagacgagcatcaaattctgatcaccaaaatgcaaatactgcatcacttcagtcgtcagtgtcgctaagaaaacactgatcagggcaatcgctagatcctttccccctccttcaatgactttcttggaaagagaaaaaatagaagcacgctcctctttgtaaggaatcaaatgaatctcagtgtcaggcaaccgtttcagtagccgcacatcaagttcttccacaaacagtttctcataccatggcttggccaggtttttacccatgatgatgtcggtggctcccaccagcttggcatattcgatgattgtttcaaaataattgtcttcttcaatgacaacgacttccgcgcctaacttttcggctaatgtcgttgcttcatttttttcttccgaacgtatgtaaagcacagtccattcagcacctaggccttgcgctaatcgcgctgtccaacgaatacttttttctgccattttagggaatgcatcctggacaatcgtgatcagtttgctctggattccattggttcggccactgattcgattgatgtggtcagaagcccgctgaattgccaatccccgcagttgttccagttttttgggaataaaaaaattctgcaacgctcgcttggcattttcgttggcatagatttttccttgtgccaaccgatcgatcagctcatctggctcgacatcgatcactttcaatgttgcttgttggaagaatgtatctgggaccgtctctttgacttcgatcccagtgacttcttctacaatatcattcaagctttcaatgtgttggacattgaccgtcgtatgcacatcaataccggcatttaaaagttcttcaatgtcttgatacctcttgcgatttcttgatccttcagcgttcgtatgggccaactcatcgattaagacaatcgcaggctgctgctgaatgatcgcatcgatatctggttcagtcaacgtgatccctttgtattggatttctttcaacggaatctgcggcaaaccagccagcagactattggtatctggacgatcatggggttcgatgtaacctatcaccacatctttgccgagggcttttagttcctgtgcttctaaaagcatggcgtaagtttttcctactcctgcagcaaagccaaagtacacccgcagccggcctttttttcgattttctgctttcaatgtatctactgatgttggtctatccatgtttgcctctcccatcaacaatcacttacagtttatctaatgctaaattcagttcaagcacattgacaaatgttcgatcagaaaaccaatctttttgtgtcttttcttttattatagcacgaatggctgtttccttctgtttacgttctttggcgatgcgaggtacttgtatctcggctgcagcgacactaatatgcggatctaatccgctggctgatgcagtcaccagatcaaccggtacctctgtgatttgattttctctttgaagcgccgtctttctgtcggataccagtccctcttgttccgcagagaccggagacaattgggagaccgcattgcttctgccagcaaagtagcctggttgcaggaactgctgaccaatcagtgttgaaccaactacttctccctctaccattcgttgactaccattggcttggttggaaaatagcaattgaccgacaccagtgatcacagcagtatacaccccgccaaaaaacaaaatactaaacaccaagaaacgcaattgagtccctagaatctttttcatttctgcatccttctttcaatttattcatagtaggaaaaagcttagcacgatatcgatcaatttgataaaaatgaaaggtgcgatcaatccgcctagtccatataccagtaaattgtggcgcaaaatttggctggctggtttttctttgtatttgactccttttagagctaatggaatcaaagcaacgataatgaccgcattgtaaatcacggctgacaagatcgccgtcagtggactacctaactgcatcacgttcaattgcgccagttcaggatagatgccataaaaaagaacagggatcacggcgaaatatttcgccacatcattggcaatgctgaatgtcgtcaatgcaccacgagtcatcaacagctgtttaccgattcgtacgacctgcagcaatttggttggactggaatccagatcgatcatgttgccagcctctttggcagcctgtgttccagtattcatagccattgccacatctgcttgagccaatgctggtgcatcgttggttccgtcgccggtcatggcaaccaagtgtcctttttcttggtattgccgaatcaattccattttgttttctggcgttgcttcagcgaggaaatcatcgactcccgcttctgctgcaatcgctgctgcggtcaacgggttgtctcctgtgatcatgatagttttgatacccattttccgcatatcggcaaaattttcctgtacaccgtttttgacgatgtccttcaaatagatgacccccatgacttggtcatttttgacaactaccaacggggtacccccagagtgcgccactttggctacgatttggtcacactgtggtgggtaggtaccgccacgagcgagcacatatttcttgatcgtatccgccgcacctttacgaatttgatcgccacgataatccatgccgctcatccgtgttttggcactaaaatcgataaatttcacttcggattgttcaaaagcgcgttctcgaatcccaaatttttctttggctagaataacaatactgcggccttctgccgtttcgtcagctaatgaggaaagctgcgcggcatctgctaattgttcttcaccaataccgtctacaggtagaaaggcacttgcccgacgatttcccagtgtaatggttcctgttttatccaataacaaaatatcgacatcaccagccgcttcgatggcacgaccgctcatggcaataacattttctttcgttagacggctcattccagcaatcccgatcgaagagatcagtgcaccgatggtcgttggggctagacaaacgagcaatgcaataattacaatactagaaagcgcggttcctttttgcgaaagaatactgcttagttccgtaaatgggactaatgttactgccaccgctaaaaagatgatcgtcaatgtgatcagaaaaatctgcagtcctatttcattaggcgtttttttgcgttgtgtcccttctaccattgaaatcattttatccaaaaacgaatgtccattttcagacgtcactcgaatgaccaagtaatcggaaaccaccgttgtcccgccagtgactgcactgcggtctccacctgattctcgaattactggcgctgattcacccgtaatggcactttcatctaccgaggcagcaccttcaatgacatcgccgtctgccggaatctgttgtccagaaacgacataaaccaagtcaccttttttcaaatctgatgacttcatttcgatgaactgctctgattggatatcctgtaaatcattgattttgtaagtcatgacgtcttttttggcttgttttaagctatctgcctgagctttcccacgaccttccgcgaccgcttcagcaaaatttgcgaacagcaatgtgagccaaagtaagctggtgatcgtgatggtaaaccacaatggaatgtcagattgttcaaagcagagaaccgtcgctgcgatggcaccaatataaaccacgaacatcactggattttttatttgttgccgcggatctagtttgagaaatgcttgcttgattgcccagcgatatatctttttcattttattcttctcctttttatttcagtgtaagaaaatctgcgatcggacctaatgccaatgcaggtagaaaacttaatgccccgatcactaaaatcacaatcatcaacatcgtgacgaatgtcggattgacggtagaaagagtaccgtcattcacagctactttcttcttgcgtcccatgttttcagccaaaaataaaacggcgatgatcggaatataccgagagaaaagcatgagtccactacctaagacattcaaaaatggggtatctgctaacaacccattaaatgcacttccgttgttattagccaatgatgttgctccgtataacagctcactaaatccgtgagcccctttgttggtcaaccattccaaaatatccgggtgcatcgcaagcgccatcgccccaaacagcgtcagcagaagcggcgtcaaaatgactaaacttgccattttgatatcaaaggcttcgattttcttgcctaaatattctggtgtgcgtccaacaagcagtccggcaatgaacactgctaaaagcagaaatgctaacatcccataaagcccgctaccgacaccaccaaaaatgatttcccctagttgcatgagaaacatcggcactgcaccgcctaatggagtgaagctatccaacatcgcgttgaccgatccattggaagctgccgtggtactgactgcccacaaacttgaccagccaatcccaaagcgaatttctttgccttccatattggctgaaccaacgacatcgttgaaaatcggtccatagttttcactgatcaatacacctaaaaaagcggcaaataggaagaacagcgaaacaaataaaatcgttcgtccttgtttccagtcttttacccaaaagccaaaagcaaaaatcagcgcagctggtaaaaggagaatggctaaattctcgataaagtttgaaaaaatcgtcggattctcaaatggataggccgaattggccccaaaaaagccgccaccgttcgtccctaactgtttgatagccacctgactagcaacagggccaagatataaccaaagattttctccttccaaactgttgtaggccattccgctactgaaggtttgaacgactccttgagagatcaataaaatcgcaatgatcgtggacagtggtaataggatatacaataatccgcgaaccatgtcttgccaaaaattgcctaaataggattcttttttctgaaccaatccacgaatgaatgcacaaagaacagccaatccaactgccgccgacaagaaattttggacagtcaaaccaaagacttgtgtactattggatagtgccaactcgccagaatatgcttgccagttcgtattagtgataaagctgacagctgtgttaagtgctaaatcaaaagacagattatcaacctttgctccacccggcagccaaccttgaaccattaaaagtaccgtcaaaaacagcagcgaactgattcctagccctaatacactgatcaaataacgttttgcggacatttttcgctgactttctgaaccgatcaaccgatagaaaccgcgctcgatcggttggataaagcggacgaaacggggcgtctcccccgtcatgatcatcttgatataaaaccctaaaggggctgctaaaatcagtaatacaaaaaagaaaaacagcccttgaaaaacaaagctcatcataactcttcccccttgaacagaaaccaaaatagataaagcatcaatccaaaactcaaacatcctaaaagtagtaacatcttcttcctctcctttgatcttatcttaaaaaaaatgttgtaaagatagtatcaaggttcgctggatttctttatatcttctttatacgatgagctgtaacacaatctgtctgtttacagcgaattagcggatttatcttcttgcccaccctgttatatttggttatacttgtctcacttaatctagagaggagcaatcaataatgcagtttacgatctcgggtctggtcttaatcccgttatttcttgttacttgctatttgattctgcgttacaatgctgctcagctttcactttttcaaaaaataacggttggagctttgttttctatagtttcgctgtcctttacttgacttttttcccttttcaaatccaaacaggggtctatgccaatcaatccgattggcttagtcgcatcaacttctccttagcagcagatctttcgatactccctaatctcattatgttggcgccattagctgttttttattatttgatggctaacaaaacttctatttttcgagctgttctgctgggattttcggtcagctttagtatcgaagtactgcagtttttaagcaattatttcctaggcggctggcgaggggcagatgtcgtggatttgattgcaaataccgttggggcattacttggttatttactcagtcgctttcttttcactgtgctgcctgagcgatcctttcttagaaaatttatgcttcattcccctagtgagtcgtaaatcaactatcggagcaagcaaaaaagagcccgtcaaaaggctctttttcgtatctgtctattcgaaaagaaaatcttgcagttttactagatgggtattgctgttgccggaaatcaagcagatcactttgtttagcgatttgttgaaacgatcgtggcaccaaaaggcatcaatgctagacccgctagtttcagcgactgtttcgcaaaaggaatcccaataatcgtaatcgttaagagaatggcactcatcagatgagcgattgccaaaggtattcctgaaaaaatcagccacaggatattcaatagcaaagaaacccctgaaccactatagacaacttcttttccaaaaggagccaatgataaagaagcgaatttaaaacactgcaaaccaatcgggataccgatgatcgtcacacaccacagacaaccggccaaaaaccacgaaattgcaccaagcaatccaccaaaaatcatccaaatcaggtttcctaaacaactcatactcatcacattcctttcctttgaaaaaagcggccatcatagatgacgaccgccttgcattatccttcgttcgtttttgattacattcatttagccaactgcttattcgttagaatttccgccaaatacacccgtgatcgaagaccaaagtccactgaagaagtttttaacattttcccatagtcctttggatttttcttcaatttgtttgcgggcttctgaaagatccaactctttgacaaaatcttcaaaaatatttttgtctttcatgtcgctcatcaatgttgtcaattcagtaacttgatccgaagtcacgattccctctaaaccattgtctttcaatgctttttcaacagttgcttgaatatcggattgggtcaattctgagccatcagctgtttgggcagctagctctgttttcgcttgttcttgtgcagcattcagagcttcatcagaatagccttctttgtctttgttttcttctgtaatggttgataagacatccatttcatcttgcgcaacactgacacgatcttgattgatgatgccgccggattcttcaacgattttgtagactcctgccaatgccccagaaccgtcaatcggtacagcagaagctactgttagcttagcatctgtgatcccagcagtcagtgcggcattttggtattgtgcggcagtgatgcgggtgatatttttaggtgtcgcaatatccaccgtgattccttcgccactatcaagggtctgcatgcggacagaactatacaccgcccaatctttagtaaagccaccatcagggatatatttcattaaatcggaacctgaagtcgtatagatcggtgtttctcctttgatccccagttgatccagggtatagttttcttgctcttttgttaatgcattaccaatggctaccgcattgatctgcaatttttctttactatccgtcgtagaagtcgcagtttctgagcttgctgtctctgaagctgccgaagacgaggtttcgatcgtttgtgagattgctgagcgcccttcacttgaagttgattcttcagcaaatgctaatggtgcggcaactaaaacttggctagaaaccaagagagtggctaaaatcatttgtttttttctgatattttttttcatagtatcctccatctaactattttcctgtttctattattgtactataagagatacgtttcgccctacggctagggtcggatttgaaggaaaatttatgatctacttgtttaaagaaaaaattaaaatgtttttttatcgcaatattgaggatactgactacaaacgtatttattatctttattacatttgttattgactgtgtggttacccgacactatatactgattattaggaggcgaacgatgaaattactgacaacaagtgaactagcaaccttattttctatttcaaaacacacaatccggcactatattgatattgatttgctgacacctaaggaaaggagagacaatggttatttctttttcgatgaagaaaatgtttatagattatatcaaattatcgttcttaggaacattggctactctcttaaaacaattaaaacggttttaactgaagaggatgtagcccactattttttggaagctgaacaaaatcttcaaaaaaaaatcgacgaattacttgctataaaaaataccgtgcagaacatcatccaggctcaagaacgctacaagctaaatgaaataactttctttgaaagagcggatcgctacttccatccttttccggaaacggttattgataattccgagattgatttgatcaaagcaacaaaaatgaacttctcgtccctcgatcaactattctatgttcataatgaaaatgaagtgattccttgctttcaaagcaaaaataaagaggatgatcttttctttgctaaagggacttatgccagtatgagctttatcgttaatacggaagactgcattaaaaaaaatattgatctttttttagctgataaattactagctataaaggatacttcaccacatcatttcttagtttttgaaaatatctattgttcattagcctataataatgccaccatttttactgttgagattaaattataagaaaagaggattggatatgtttacagtaacaacggaaacaattgcggataaaagaattcgtgaagtaaaaggagctatctttaatgaacaagtcatttcaattaacattgtgaaagatacaatcagtggtattaaagggatatttggcggaaaatctactacttattctaatgaatattcaagcggaaggaaattggctcttttagaattagaatcacaagcccgtagtctgtctgcaaacgcgataatcaatacccgtgttagttataatcaatttgtaaattctgatatcatgctcatcgttgtaacagctagcggaacagcagttgttgttgaagaataggtgcactaggctctcatctataaaaaatcagcttactaaacaatgtaaggcagcattatgccgtgatagctcattctttccacattaatttttcgcctgagaaaaaagtatgtttttttgagagtctaggtataagacccttttaataactcacaactccaatcaagcggcactattttttcccagcaacaaatttaggaagaaacgtctatcatttacactatgcacaattaaaaacaaaaatcacctgtgacaaagtgatttaaatagaaaatttattagaaaaaagaaaaaagccttcgcttctatttgtctattaatatatcttcaatcgctaaacacatagacctcttaacaagtcaaaaaagtacggcctatcgatcaatcctgagtagattgaccagtaggccgcttgttcataattgaatctattcctgcttcttcattatgaagtaagcgttatatgcctcgtttctttgaaacttataagagttatctaaggtctgtatgctatcaatactcaaactggcgatagtagcgtcgtatctccattgggtggcaattcatttgctcgacataggcatcaatgcgttgtgtcacgcaatgcatcaataaatgagacagtacacggccacgatatttctcactgattcctgaaacaggatagtctttcgtgtcgatcaatgtatagtcgccacaaattcttggcaataatttagctactctttctgataatggccgctgttcatcttcgcctaaaaagacggtcacaggggttgtttcatcaacgatttccaacgtcccgtgaagaaattcagcggcgtggattgatttagaacgcaaccagctttgttcttcccagtaacacatagcgtaagaataaacagcaccccattgatttcccgcaccgatgaaatagtgcatcgcatcatgacgatgtttttccgcaaacgatcggccaaattcatccgcttgtttctctgcttctactaatccttttgctagatgctgatccaattcttgataatactcttcgtaatcaggaaaatccccatgatttttcattaaacgatccgcaaccataaagaatttgatttgttctgttcctggtgcaggatacgtgatgacatagtcacactgttctgccaagacactgccttttgtatcaataaatcctagcaatgtcgctcctacttttttgatttctgcgacagcctttaccacttcttgtgtcgtaccagtgacagatgacaagataactaatgagtcttttgtcaagcgacggttccctgttgtatagtattccgccgcatgttggacataaacaggcagatcactttttccattgatataagtaactgcttgcatagcagaagcatacgtgccgccaattcctagataatagatcgcatcaaagcctttttcgtcaagggtgtcgaccaacttttcaatttctgggcgcaagtctaacattccttggatatcatcaatttgttgttgttcattaaatttaagcatttttccacctctaaattttactttttaacacttgatcaaaatcgtcaaaaatacgtttacttaaatcgattcctttagcagctgccccaagataggagaaaatttgaaacggaataactaagagcaacggagaaaaaagttcctcacatgcaacatccagcccaagtgtatcggagtcagccgctgctgctacagtgattgtataagctttccccacatgagaagtcatataatcacacaataactgagatcttgtttgattcgagcttggcgcttcaataaagaaaagcacatgttcatggtttgcttcaagataaggaccgtgcatatacgcttctaattccacgccttgagaaggtactcgaacagtttcggtaaatttcgtttcaaattcttttgcggttccccagtttggaccgtaaccaattgtcacaaaccgattggctagtttaaaagtactgacgtttttctcaaaaaaagctatcgttttatcaatgacttgaggaacggcctcaatcatcttctctaactggcttttgataatcgacacttggtcatcggacaataagcctttgctgtagccaatcgatacgcctaacagatagagttgcaataccgttgcgacatatcccttcgtcacgaatccaacggtctcgatcccggttcctaaatcaattctttcgtttactttttgcacaagggggctttcgagatcactgctcaaaccgatggtgtaaagaccttgctctgacaaatgcgccacggcatctattgtcgaggcactttttccactttgagaaaccgccagaactgtctcaatttcttttgaaagatgaccataatgattaaagtggtatggttcctcgatcgtgacagtgatctgcgccaacttctccagtgcgtactttgctgctaaacaggcattggcagaagagcctgttgccaaaatcattaaatgttcaatcgctaatcttctttcttcttttttaggaacaaatccttgcaatatctcaactaatgtttcttgctcttcctgaatataatccatcatcgttgccacaacaattcctccttaaaaaagtccaatcaaggatcccaaaataccaactactgctaatccaagcagaataatcaacggcttgacttcttttttcagcagataaaagacagccccaaacgcacctaatgataaaattttcgggacgatatcatcaaagatactttgtactgtaacagcattttcacccgaaccgatctgtaacgggatattgatatcgatcatcgtagctgtcattcctcccacgaccatcaatccaatgatcgcggcgccgtatgttaagctttccatcataccgttttcctggattttctttaaaaatcctgttccaagcttatatccccaaccagtagcaaaataacgaaacagtaaatgaggaatattgaaaatcagcagaaagagaatcggtcccaatatgtttccttgtaaagccaatgaagttcctactccagtggcgatcagccgtaacgttccccaaaagaaggaatccccaatcccagctaaaggtcccatcaaggatgtcttgatgttatcgatcgctgaggaatcaaaatttggatcattcacattttcttcttccatcgctgcattgattcctaaaataagtgtcacgatatgaggggtcgtgttgaaaaattccagatgacgtttcaatgcatcggccatcgattcttttgttttgtaaagtttctttaaaatcggaatcatcgcatagacataagccaggttcatttgccgctcatagttccatgagaactccatttgaaacgaacgccagaagacacgattcaattcttttttggtaatttcggctttctcattagaagtcttcatcatcatctagtacctcccctgaagtcgtttgaacagattgcccttgttcgcgtatgtttcttagattcacaactacaacggctgttatcgcaccaaagattgcaattcctgtaacaggcagctctaaataagctgctaatgcaaaccctaaaaagaaataaggggcaacttgtttattgatcagtaacctagccaacatggcaaatccaagggctgggatcaagccagttgctactgataaaccgttctgaacaaaggccggaatcatatccaacaatttactaatcgtattactgcctaccatgaaggaaatcgtaactacaagagccaacatcagtgataagccaaaacctgccaataagtgcattctttccacacctttgtagttaccatctgccgcatacaaatcggctttttggttcatcataggaatgagcagtcccaagtaaacatttttcaagataagtgtcaatgttgcgatcgggagtcctaacaataaagccgtctccgttcctgctcctgctgtaattgcaaaggctgtaccaagaatcccaccagttacgacatcgggcggaatagacgcaccaacagaaaaagagccgataaacgctagttccagtgttgcacccataatgattccggtgctgacatcccctaatacgattcctgtaaacaatccagtaacaataggacgcgacagtaatgacgttcctaatgcatattcagattgcgcgataaatgcaacaattccaagtaatattgcttgcagcatctctgttactcctttctttataaaacatcttcgacagcgacttttttatctgaaggtacttgccggatatcgacagcgattcctttagcaaccatttttttcagaagttcttcttcaaacggtaaaacattgactgctttgccaatattcttggtgccttctttggctttgatcccgcccaaattgattttagtgatctctggatagttttccgctaacttataggcatcttcaatggattccaccacgatgaacaacttgtatttatcggtcacaccgcttttcaacgcatgaatagaatcttcgattgttttgattactagcttaacgccttgtggtttagctagtttgatcgttgtcttacgaatgtcatttgtcggcacatcatcattggcgatcaagatacaatctgcccctaagctttgcgtccaagaaaatgcaacttgtccatgtaagagtcggtgatcgactcgtgtcaaaataatcatgtcgttcctcctaaaattcttcttcttcgatttcttttgctacactctcattgcagaactggatcatatctttcgaattagccaacgtttggtggatcgtttctgagatggcacctcctccttgaagttgtgttgtcaattcaatcaacaatggcaaattcaatcctgcgatcaagtagaaattcggttgttggatataacgtaaaaattcattgttcacactgccaccgaaaatatctgtgataacgatcatttcgtgctgtttataggtttccatcagtgtatctatagttgctgttagatcgaatgtttcttgaacataacaatcaatggcaatgactgattgtttttttccacaaataagttctaaagaatgcaagattcctgatgcaaatttaccgtgtgatgctaaaataatgatttgctccactgctttcacctctctttgcgccaagttacactttattaaacgcaaaaagcgtgccaaaaaaagtggcacgctttccttatcgattaaaaatccgcttcaaccattgaagaatcagtgtttccaaataaaacatcatagatatagcaaacttcagattctggtatcgcgacactgtaaaccttttcaatgacactaaacgcctttttgatctctttcagctgtttttcatgacactgaagcagtgtgtcgctggcatgataattctcaatggcttcatttcgaatcagtcgttcgatcaaacaacttgtatggacaaacaacgcaagcttgcggtcattagtgattctttgctgccatatacgttccagattccccacaaagaattccatttgagaaatcactttctctgtatctagaatcgtcacagattgaatcactcgatccagcgaaaagtttcttactaattgattgttcacatacgcaatcatctcttcatccaattcttctttcagccaacttaatagcactgctgtacctgcgccagaaatcagttcttctaaagaaataaaaggagccagctcttgacgaggtttgttggttcctacaacaccaacaatgtcatacgatgtcaaagcctgtttgacatgttccctattttccaactgattgaactcataagggagaattcgaatctgtaaatgatctggaatgctcttttctaataaatttgagatttgaaccgcagttccaatccctgttgaacacgttgtgatgacaactttctcttttttcgtttgcggaagaataatctcccattcattttgactgtaggcatttacccgttctggaatttccctcagcgaaacattttgctggatacattcccccacagcgatggctacacttgtcgttacattgttcatcatgacgattggaaccgtcaattctggaatatactgatagatttctttcaacgaacccatgtcgaacaagaccactagtccattagatacatcatttttttgaatatatgcggtgaccctttctgcaatttgcttgggcgtgacatctaatggcatatcgaaagactgaaaaaccgattcattcaacaaacgattcgctacattcgcaatgctgctggcagttgcgtagccatgagccacgatgatacttctcggaagcaatgaatctttggtataccccatatcgttgatatagagtgtaaagataatgcgatccatactggttaactcgatatccaatgctttttgtactagccctaacagattttcggtgtagcgatcacttgtcgaataatgctttttaacgctcttcagtaggttctctgtcaataaaagtttgtcttgatcatccggcagccactccacatttcgccgcagccataaataataactgatcgtataaaccatgctgccgttaaagctgatttggaaggaatgttcaatctgttccatcattcgctggacatgctcggtcacaaaaatcatcgtccgctgcttttgttcttgcttatgatcaaacaataaattttcgaatagtctttcaatcactttagaaataggatcagctgcagctgtaaaatcctgtcctgcctggacataattgagcaggatctgttcatatgtttgaatgatcttttgttgttctggctcactttcggcagtcagctgctggatttgcgtttgcccatcgataagaatcgattgcgtcgtcgctgactcattgggttcatctgtcaattgcagtaaatgttctggtaaatgatagaccgtgactgctatttttttggctttccgctttagactagcagtatagcttttggcagtaataatcttgatcgtacttttcaattcaccgacattcccagaaaaatgactcgtcgttaacatttcgatcacttgaggtgagagttctaacggcaaaccgatgcgcttttgctcttcaaaaaatgcttgcaagatcagttgcttccgttcagaaatcgttcgttcttccaaagcaggcaatgtcgcttggatcgggattcgccgcaaaaaagttgttagaaaagtttgtttcaaatcttctgtcgttgcaaacaccaaccgacaatccaccgtgactggtcgtcttgtatcccccattcgatagatgacaccttgatccagaaaagtgaataatttttcctgtccttcagcattcaaccgatgaacttcatcgagaaacaagacaccgccatctgctgcttcaaaagcaccagcacgatcttcctctgcgccggtaaaagcccctttgacatgtccaaataaattactagtcaatagctcttggttgttggcgtactgtgcgcaattgatggtgatcaaaggcgcatcgacctccaataattcattggccacacaatagtgatggaacatttttaccagaaaactcttccccgtcccactttcccccgtcagtaagaagggaagcccaccatttggatagaaggcggccatcttgatctgttcaatgacttctgccagactgcctttgctgccgatcacactggaaaagaaatcttctttttgatcaaaaaaaggtttttccgccgcaacagcagccagactctcgtatacgttttgtgttaaggggtagttttggctctcaaatgcctgcttatgaaaaaaataaacgggtcgggtcgcaattttcactaaatgaccttcttccgttagctgattcaaatagtgactgatcgtgtttctcttgactgaaaacttctcggcaatatctttcgctgtaaagatatcgcttacattttctgcagagaaaaaagccgtctggttttgcaagtaagcaagtaattgttctttcatcgctgttctccttgtcctctttctccgtttatcatagcttacgattcttaaaaagccaagaggtgacagaggaagttgcttggaatgaataatttcgaggatatttccctcgactataggtcatcttgaaaagagtccttagcataaaatttatgatccaataaaaatcactcaaggcagtcacattttttttagaccgttcacagatcttgcccttccgctagagactcttttcattttcatagatacctctatttcttgcaatctaaagtaaatcatcaaagctgacggttccgcaacaagtcctccctttttattcctttacaatactctctacttattgcattctattcctttcttaaatcgttacttccgtatgatcccggctcaaggtatataggctggtttcgactttgaagtagtcttcgactaattttttcaactcagccattgcggcatcagcccgtaaatgttgttcttcattgattgattcaatgaacaatactgcgttgacggtctcttcttttaacatcgtgcgttgcgcttctcgccaatttaaacagcggcagatggctccttgctcgtcatagtaaatcaattctcctgctagagctggcgcatccgcctcggcgcctaatgggaaaaatgactccccacccttggctagtccaaggtgtaaatcacctgcgattgcagccaaatcttctccacctaaaggcatcccatacttcatagagacactattgtagagatctactaatggattgattggaaaaaaagttcgatcttgattgacacgcttcaacaatgcttctatggaagaacgggcacctttttttgttttaaatttttggaaagcttcccgccattcttggacaactggattttcactgaaggttgcattcgttaagaatcgcttagcttcgcgcttaccgttttccagcaattccgtaaaataactttcttttgcaggatctattgaattgtcgatccctttcacaacgagacaactaatttgtgcttggggaaagatttcccagaatgcttgatcaattactattttcttcattgctttcacactccaaatgtattaataaaaaagcggcaaaacaatatttgctagttccgccaattgattccaaaagttgatcattatttaaacctgtccttttaaactagggaaggttgatcacatttttgaaaaagaaaacgattttctatcctacagtgccgatttctcttgccctatctaattagtagtctctttttccaccattctttacaatcgcccaatccgattcaatagattctctgatctttgaaagtaaatttgacaccgtttctatttctgatgcggatagttgagtggtagcgattttgttcgagtattcgttttctcttaagataaactgcacaacatgctttcctttttcagttgtgtataaatgtttgatttttttattgaacggatcggattcttttaaaatgaatccattctcttccaactttcggacagctcttgacagcgttgtccgatcgactttaatcacctctgctaatcgttcagggataatcccctcattctcaaaaatacgaaccaaataaatatactgccctttgttcagctttaactctttaaattcaatattggcaatggcatcaagcattcggctaatcgagccaatttctcgtaaaatgtcattcattcttctttctcctcttctatcattatcctacctttttattgttgcaaatgcaatattttttcggaatagaaaagagcgaaaccaatgtttcactcttttaaaaaatatttttatcacttatacattctgttgctagttgatcatatttcgccaaccacatgactaacaacaaagattgtttcatttgctcattgcttggaggaagagagctaaaccattgatcattcactagaacccgtcagaggtatcttctatctaaagactagctgattttttccctcagttcgttttgtctgtttttctgacacgtattctcttttattcaaaaaagaactctttagaattgtttctttttcataatcgaaatactgatcctcacagagagtgccaaaagtagcatagcaattactaatgcaataagaaagagcattcccatgctgacaatgggcaatgtgttcaattgagcaatcagatcaacattaaagaagagctttgccccttttacaattacaacaccagcgactaccagaagtccaacagcaccaataatggcaattctgcccttttcgccgccaaactttagttggaagggaaacataatagattggatgatgatcatgatcggcaggatcattgctgcaatctgccagacttcaatgagagaagtattatgtctaaccattgatgcaattattcctaaacaggttgccaaaagccatgaactaaatcccagtaggaatcctagacaatatttttccagcacatagcccactcgagtaataggtaaagtgaataaaaacgcatacccattgtcaaattcatcatagctgatagtgcttaatgtgaataaagaaagcgcaaaggttaagaaacctagtgggaatgatacatcctctgtaaacgagatcattcctattacaatcaaaagaataaccaaaaagaaatttttttgtgtggccatcaatttaaaatcttttaccaacaaacctgtcattattcacgcccccttaccatcatcataatcacttcatcaattgatcctttttcaatgactattttaggaaaattctccatataaaattgtttttgattcgttaaacaactatacccatagctttcttctttgtatcggagaataaattgtttatccagttctttgtattgctccggatcaactttcaatagtgcataatcacttaacaagacatcggtctcttcgtgtaagatcattcgtccatcatggatcatataaagatcatcacaaagtgtttctaaatcactagagatatgggaactgatcaaaatcgcacactcttcatctttttccatgaactctctcaacatcaaaagtaattcatctctggcaatcacatccaagccagctgtcggctcatctaaaagcaacaatttagcgtgatgcgatatagctactaatacttttagttttgctttcatccctgttgaaaaatcgttgagtcttttatccactggtagttggaatcgctgaatttgttcggtaaaaaagtcttcgtcaaattcgctatacattgtccgtaaaatcggaacaatatctttaatccttaaatagccgctgaagccagaatcggataaaacaacacctaacttttccttctcttttggggtgagttctttactatccttgcctaaaagtgtgatcttcccactgtcaaaaggaattaaaccaagagctgctttaaacgtagtacttttacctgctccattttgaccaatcaaccctgtgatagtacctttttgaacttctaatgaacaatcaagagaaaaattatcatactgcttttttagatgctcaattttcaacatgtttcaaccctccaatatcaattcaaacaaactttttatctcttcatcactaatcccgcaacgtcgcccttttagaattgcttgttccaagtcttgttccagctcctttttttgctcttccaataaaagctctgtattggtagcagctacataagttcctttcccgtgaaccgttactgtaaaaccttcagattctaacgtatcataggcttttttgaccgttaaagcactgatctttaattcttttgacagtgtgcggacagatggcaacggatcattctcattcagctccccatttcgaatatgccctttgatttgatcgacaatctgctcataaatcggcaccattaaggaagtattaataatcaatctcacattttcttcccccttctcgttgcaaacagtatataacagtatacaactgttatcaagtgttatatactgtttattaaaaaatttttgagtttttactgaacataaacaaaaaaagctaggcaaaagcctagctgagaacacgatttaatcgtgaaagatagatagttatttcatgcgtatgataattgtcccacctataacactcacaatcattatgccgaggacaagcatccaactcgccttctcatcatttgtctgtggaagttttttatcattcgttttatttgaagcgtttaaggcagcagagtgacttgattctgattgattgttctgagtccctaatatggacgaatcagttgtgtttggttctgtcgtacttggttctgtcgtacttggctccgttacgcttgctctgtgacacttggctctgtcgtacttggctccgttacgcttgctctgtgacacttggctctgtcgtacttggctccgttacgcttgctctgtgacacttggctctgtcgtacttgatgtttcttttttagtattggtaataatgatggtaccatcctcattggttaccgcactttcaaagtcatctggaacattgacttcttcgacagtgtaaaagaaatcttccccttggttattgtactttggtaatactacattttggccttcaactgggacttttgtgcgtgttccttgatagccctcgcctttattcgaggttaaactatctgacatttgccaactttcagcactaacggtggttgttcttttgacttggtattcgatctgatcaggaatctcagcatctggaacattgacccacttcttcataattttcaattctacgacaggtgccttgatggatggaataggaaaatctaaatattcaccatcacttcctgttgttaatgtcgtacgtccattacacaagacccatgtttctccttgaaactcagcggattctgtatttattcgaacctgataagttagggtaagtttttcattttcacctaacgcgatgttgctgatagagatggtttgattagcttcagttacttgaactgctgcaacaatttcaggagcttggatccatgctccttgatcatttttgcgccacccgaccaattgataatggctattatcaaacgtaccggctccttgtaaaaggattccttcccccatagggtctgtgatcgttccattgggaatcgttttatcaatgtggttcgcaatttctttcaatgctgaaccaagaccgctaaggttttcgtccgtcgtcaaataattagccggtgcagtagcaagattacgggcaatgtattcaccacttgactgctgactggaactgctaaactatctgttgaagtcttacttgttgtatggtattgaggattagctgtttggaaagctttggtatagctgctagtatgataaccattataatcattgatctttcctgtattgggatacacagttgcattttcagcaggtaaatagctgcgattggcactatcatcgccaatatggataaacttcttttcagcttcaggtcgactttgttcaagaagcagacgttgtccctccatcaagcctttttgcataaatgttcctgagtgtgattccgccgtatgctgtaaaaaattttgcagataatcgatattggttaccttggacgtatcaaaattttctatggccaattctttaagtgaactcgtgccattaaacatggctgtcatgtcaattaccgaggatgtatcccattgattcaagtcaagactttccaaggagcttgcattcccaaacatccagttcatatgagtaactgaagacgtatcaaatttattcgcaccttcgattgcccttaaatttgatgcccccataaataattgtcctgaatttgctggtaggacaaccgtttctttaacaacaataaattcagtagccattgatggaagtttccaaggtgctgcatccacaagcccagcaacccctccataaagcgtaattgtttttgaaacttcatcatagtcccatggaacagttccccagagagaaagctgacgctgataaacgaacacaactgtctgtcccgtatccgagaacgttcctgatacattatcgggtaccgtaattaattcccagccttcgattgttttagcttctgcggtataagtgtctccgtaataaccagtcaatgtcgcactctccgcaacgtcatttccagattcatcaacatatttcacaagaacttctccggctggaattcgcttataagtaaaaacgacggtctggtcaactccagtaaacgtaccagccgcattttgaggagttgtcattagttcccagcccgatatattcttggcttctgcggtataagattctccttgatagccattcagaagcacggtattcgcaatctcatttccagattcatcgacatgcctaactgtcactattcctccaggaatccgttcatatattgcttgaatgactgcttcaccagctccttgtaccgtgatcaaggaagattctgcataaacatcattgacagaaaccccaatgctgctactaatctcccacttgacaaaccgccaattaacattgggtcttgccattatacctgggatcgatcccgtaggtgttggactcacaaattgttgaggatttcctccttctggcggattagcaattaactggactaagggattatttcgctctagaggatgattcattacttgttctgattcttgcctatttgattcgacggtattattggattgagagatctcctctgcataaaccatatctatgggaatatgcgataaaagaatggagaagacaactagaaatttaatcagttgatccattttttttactttttccatcattccctccttttgtataaactagcgaatttaaccatgcgtttcctactctacataagcaataactgcgtttttaaactcgtttaacattcgaccgtttgttattgtctattttttagacacattcctccttccaccttttaaaatcaaaaatcttcgtttttaataagcaaataaaaaaacggacaaatgactttgtataaagacaaaaatcctttgtctctagacagcgcagatgaagtgtgtcccccataagtaagcgtctcaaaaacgaaggcttttgagacaaaagattgagaaatttaaatttctcgagattaatcataacaactcaaaaaaaataaaacccaccaatattttctttacctagtgaaaaaattgacgtgatgttccccttcttcagcagaaaacattttcttcctcaggggattacataacaaaggaaccgatatatttaaaaacagcaatgtgacagggattgtttttttagaatgttttatttccgtaaatagcaaaaaaaacttaacgaccgccatttttttcttgtccttactcaacgccctgctctcttctagacaaacaaattcagcaattattgttttggtttatctgctatcttcaaagaaaaaaactgagtggggaaaaataggatgtttgaaaacgaattttcatttagtcagacaaaataattcgttattttacgttatatacttcatgtacaaaaaaaggtattctttcactaagaaaaattttcaactggaggaatatagatgtcaggaatggtttatggttatgcgcgagtctctacaagacagcaagatctttcacgtcaattggatttacttgagaaatataactgccataatatttatacagaaaagattagtggtacgcaggccaatcggccagagttgatcaaattaaaaaagcgcgtgaagcaacaggatcaaatcatcatcgaaagcttttcccgtcttggccgcagtaccaaagacttaattgatttggtatatttttttgaacaaaaaggtgtgaaagtaatcagtgtcaaagaaaattttgatactcagacaccgcaggggaaattgatgatgaccgttttccaagcatttagtcagtttgaacgtgatattattgtcgaacgtaccaaagaagggctgatttctgcacgggcaagaggaaacattggtggtagacccaaggtagatcctcagttaatccaaaaagctctccttttgtatcaagagtagggctattcagtagcagaagtttgtcaaaagaccggtgtcaagaaagcaacgttttatcgttatttaaaacaatcagcattgcaaggctgatcacttggctttccttcgctaacccagcaaaccacatcaaaaaacgaccattgttttacgatgaaaacaagctcatcacgagtaatccaatggtcttttttctaattttaacacagcaaattttctagtgtttaatcaaatattctctggttcttcttgtttctgataatattttttttcgaaatcagtccatgatcggctaaattgatgattcgaaaaggcactctttaagccggagctttgtttgaaacgaaagacttcttctgcctccattcccaattctttggcaatccgatcatctgtccatccgcttgctactaattgttgaacgattttgctcatcttctcgataccatgagtgcctcgagctcgattatgtctaacagtggaagccatacggtgttccaatggcttatcgataacagtcactggcacttcttttaggttcaaccgttctttggccacttgatagcggtgaaagccgtcaatcagtaagtacccttctttttcgttgtcaaaataacagactaatggttgtgtgaatccgtcttcccgaatcgacaactccaaaagttccaactcgggttccgctactttattgggattgtagtgattggcgtgaatttgaatcaatggaaccatttttacagctagcacaggaaaagcaattttttccattaaacagaacactcccttttgagaaaataatagttcttcgtttggcgaaaaacggtgaacccttttgtctggaacaacgccacttcgttagggtgactcgttgtgactgtgatttcttgatctggatgtttttttcggatgtcatgcagcatttttcttaacaaaagagtttttctgcctgaagcaggctctttttcatagaattcgccaatctcgatgcgagctgtttttttttcatagtaagagaagcccatcacctgattcagcgaatccacgatcacataccaatggcaatccccagaattaacgagatagggaaattgcttttggtagattcgctcagcaaagaaaggccccatcaattgatagaaatgtcctttcttatatggtggaaaaaagacgatcagttgttctttcaactactccacatcctttcagcaaataactgattacggctgattcttggtcaattgttcataggtctttcctaacttcttcaattggtattttggcaggtgttcgatgcctaatgccgcaccaaattccacggctaacgcatagagttcagactcgtctttcttggtcaatgcgtattgtctggtactcaaagaaaaatcatttttttccaatgctttcgcgatccccttccagtcatgccaaagtacttcattcttcagccattctttgcgtttggtttcatcggggatcgcctctacatgaacaccgtacttgtcccgatagtgagcgatcagaatcgatattttacggtagtaatggtcttgcagatttttggaatatagcccaatcgattccagcaaaaagacagcgtactcctgccaagtcatgtgggcaggtttttgggtattgtaatgagccaacaaagaagtccgtgcatacaagcggccaaaatttgcgccagaaacacggttgacgactttctcccaagtatccggttcgactaacgcatattgagaaagtccttttcgttgctgcaggccatatggctgacaaatccgcatttgggagagggacactccataagtgtaaagcttgtcataaaaaccattcatttcccaatcaaagtgcgcatacgccccccagacgtcctctgtcttccagtcataaagcggataaaagttgagaatctccccttgattggtttgatgcttgatccagcaatgtccttgataattgaaattccgatttaaaatagcccggtagcgatgcaagctttcttgggtacgaatgccgatgccgtaggcaaccggctcgcctttatgatgattcgcataccaaaaggcaaaatttttcagaaatttatctgggtttaaattcgcactttggtacagttccatcattgattcatcgagatctgacagcgaaatcgcatccctgggcatttcttggacccacttatcccgttcgacttcatcccacattttccactgaggttgaaaaatactagtcgtgttatcttcataaaatggcaagcagaaatgatagacctgttgaacgcttttcagccgtttgatcgattccataaagttccgagttgaacgataattggcttcgatgtctaaaatcaacaagtcaaattttttccacttttttgggcaatttggtcagctaattggaccattgctccgctgtctttcccaccgctaaaagagaaataaacatgaggaaaggtattgaatatatacgtcagacgttcctcagcagctgccaacacattgatatcgtattatttcttcataaaccccgcttcttttacttatttttgattgaatttgtgcatgtattcactttcattataaagtgaattggggttgcttacaagcctacctcttaattgcagaatccttcttaacgaaataaacatccaaatatttccactctttctttcgattaggaaaaaaatttgtctgtctaaccctgacattgcttgagctggatcatcaattaagcggattgggaaaatccaatggttatcaaaacgtaaaaatcccactggactagttgctagtctagtgggattttccttactccaatggaaaatcatcgttcgtttttattgtttcgtcactttctccagttgagtggttttttttccacaagatgtacacaacgatgacagcaaccattaagataccgcaattcaaccatttggcatcatttaatacgtgtaaatctggagatgacaatggatcgtttcccgatagctgtaacaagatattcatcgggcgatcaaagagagttgtcataatcagtagaaaagccatcatgacgaattgatgcgtgacactccccttattttgagtggtaaatttggcgatcattcgctgatcaacaggcaaagaaggttcctgcgcataccgttgattcaaccagctgctggtcaaagattgccaaaagcttaataaaaacaaaccaagaacaaaactttgtggaaaaagaagcacaaacaatgaaagagccaaaccaccaagcagaactggaactgtatttggaaaaatcccttgcagaatacgtttgcctaagatcatggacaaaatcattcctccaagataaggcaaatacaaatagcgagtcaacgcctctgtcccatgtagacttcctagataaagcgctccaaataagaaaacaaaattccctaacatgccatttaaaaaagttagcacgttgagccatgagggcagcttccaatgcttcttcgctcgtcccagataaaatacggcacctaagaagaggaaaaagaaaccataaatcgcccaatcaagcaattggatatttgccaataaacgtgcattccgcagcaaaaagagtaacaagaaaaagattagaaaaagaagcaattctttaaaggcgatcacttttgaattcatttgcttaaagtcgatgctatatctaggatagtgggtaactgtatggtaagccatgacgtaaaacatcgtatacaagccaaatgcggctatcagcttcgttgtgcctgaccattccatcaccactaacaacaaaatcagtaagaacaatgcaaaaggcacttttttacgagtcatattgataaatcccaagttcttttcatgaagattgaccgtgcgattcgttggaactagccaagaggcactcagccctagcagactaccggataaatagaaaaatggaaaataataaacacctagaactccagcaaaggctccaacaccacccatcagcaaagcaccaatcagcagtgtataactgtctaatcccaaacgtatactgcggatgagaaaaattcctgtcatccgtaatgtataaaataaagtaaacggcaaaatcgttaaccaactcttgccatcattcaatcctaggaataacaaatacggaatcacgattaccgtattacttaaaagaaatggggtcgtttgtgcaaacgtcacgagccatttcttgattcgttgaaccatcaggaacctccttatttctctctaccaatcactcatctgtggtacgatctattgacatgtacaagtgatcgtttctcatttattataccttttctatataaagaccgcacggctttccataaaaaaagaagctaagagtcgaaggcgttattcctttatcgctcgtttagaatgtcgtttttatcacttacatcttttcttccattgaattcaatcattcgctatgctacactagcgttacttttgtttggctgacgaaccgctgccccaaccatgttcgtttggaccaactcgttgcgagtattcgtgttttcggatgctctttttgtcgcgttttttgccaaaaaagaaagtgagtgaatccaaatgatccaagtgcaacacctcaacaaaagcttcaaagtcgcgaaacgccaaagtggttttcgtaatgctaccaaagcgctctttcatcgagaggtttcaacgatccccgctttacaagatatcagctttacgattcaagaaggagaaatggtcggatacatcggtccgaacggtgccgggaaaagtaccaccatcaaaatcatgtgcggcgttttgacacctgatgacggaacgtgcttgatcaacgggcgcgttccatggaaagaacggatcgatcatgtccgagacattggcgttgtctttggtcaacgcagtcagctctggtgggatgtcccagtcatcgacagtttcgagctgattcgtgatatttatcgggtcgatccgcaagtctatcggcaaaatctggaagagctagtcactttgctcgatctaagcgaaacgttgaaaacccccgcccgttccttgagtctagggcaacgtatgcgctgcgagattgccgcttcgttgctccatgatcccaagattttgtttctagatgaaccgacgattggccttgatgcggtgtctaagatcgcagtgcgccaattcatcaaaaagcgtaatcaggaaaagggaacgactgtcatcctaacgacccatgacatgcaggacattgaagcattgacagaacgcattttactgattggtaaagggcaaattttattagatggtcaattgccagagttgaagcaacgcttctctgacgccaaaacattgcagatcgattatctaggaatcgcaccgacacttccagcaggcgtcactgtaacccaagcagaaatcgggcgattggaactaacgattgatccaaatcagctgaccgttccgcaagctatcacacagcttagccagcaagtggagatcactgatctgtctgtttccagtatcacagcagaagaaatggttgctaagttgtataaggagtaccatatatgaacaagtatcaggcactttttcgcatccgttttacaaatagtctgcaatatcgatcggcagcattcgctggaatggtgacacaattcgtttggggcatgttggagattttcgctttccgcgccttttatcagaccgatccagctgcttttccaatgacctttcagcaaaccgtctcttatgtctggatgcagcaagctttcttagcattgttcatgttatggttttttgaaaatgagatttttgatgccataacatcaggaacgatcgcttacgagttggctcgtccaatggatctctatgaccgctggttttgccaatcagcagcgaaccgctgtgcaaaagctttgctgcactgcctgccgatttttgctatcgtctttttgttgccagtgccctatcgtttggtcttaccagaaaatctgatgagcatactgctgtttatgctgtcgctggttttaagtctaggcgtcgtagtggctgtgtccatgttgatttatatttcgacattctataccctttcttctctcggggtgcgagttgtgatgggggcaatcggtgaatttctcgctggcgccattattccgttgccatttttcccacagccttttcgacaaatcgctgaattgctgccttttgccgcgatgcaaaatgtcccgttacggatttatagcggggatttggttggacatgcgttgtggcagatgctgggaatgcagctcttttggttggtggtattggtagctggtggcaagttttggatggctcgtgcgttaaaacgagtgattgtacaggggggttgaagatgtctctttactggaaatattttagtatccatttgaaaagtcaaatgcaatataaggtttcgttcttcttgacggcgttaggccaattccttggttcctttaccgcttttctgggaattttgtttatgttttcccagttccatcaagtggatggcttctcatttgaggaagtgctgctgtgctttgcgacagtccttttttctttttcattagcggaatgttttgcccgcggtttcgacctattcccgcaaatgatcgccaatggcgaatttgatcgagcattagtccggcctcgtccgctagtctttcaagtgctggctgctaaaatggaattcactcgcattggtcggctcctgcaagcattgctcttgttttgctatgtactgccaacaagcggcattgattggcagccaatcaaagtgctgactctgactttgatgattctctgtggtgccgtcttgttcttttttctctttttgatttatgccgccatttcttttttcacccttcagggattggaattcatgaacattttcacggacggcgcccgcgaatttggccgttatccatttagcatctacggcaaacaagtcttgcggatcttgacctatgtcattccaatggcttggtttcaatactatccctttttatttatcattggttggctggagcagccactgtgggcgttcgctccattactatgcttgccatttggtattcccgccctcttgttttggcgctttggtctgagcaagtatgtttctaccggttcgtaatgaaaaaggaagtcctcagtcggggcttccttttttcgtaagtctgcggatatttcttttaaaacgataggacaaaaaagccgagcgagtgtacaagtcgatcccaattgccagccaaacaccagcgatccctaaattcaagctattgcctaacactatcacacctactattcgtatcacccacatcccaaacgctgtactatacaatggtgtcttggtgtctcccattccttgcagcacgccagctagaatgagactgatcgctaatcctggttgattgaacgcatcgatcctcaaagccaccacgatttgacgaagtgcttcgggatctttcgtgaacaaagtagcaacaatcggagacccaataaatagtccaatccctaagagactaagaataatcacaccatattttacagataaaaaagcaattcgttttgtctcatcataatctttctttcctatactcattcccgtcagtgtagcagcagccgtcgccaacccataggcaggcatatacacaaagctttcaatactgccagcaatggtgtgtgctgaataggttttggcaccaatcgccacgatcagaccaaagtacaatacctgtcccaaacgcatcactaaccgctccaacgctgctggaaaagaaattcgcaacagttcattgaaactacttttattcaatcgagtaaacaatggaaaagcaataacagaatgctgtacttttcgataaagtaatatcgtacctaacgacctggcaattaatgttcctaacgctgttcccatcacacctaaagctggaattggccctacaccaaaaatcaagacataatccactacgacattcaatacgttcgtaataataccgattttcattggtgttttggtatctccgattgctcgtagcatacttcctaaagtagacatcgttgcaataacaatagctccgccccctacaatactaaaaaattgcagggaagaatcaagggtttcttttgtcgctcccatgatcgttaaaagctgagatccagctactaaacttacaattccaagaaaaagaccagagatgattgccaacaacaacgattgcttagcgatctgctttgctttttctaggttatttgcgccgatacttcgtgaaatcaatgaagatgtcccaattcctaaagcaatgaaaatagctatatatacattcaatattgcattagccaaaccaacacctgcaacagcaaataatccgattttagaaaccatcaatgagtcaataaagcccactgtcgtttccaagacattctccacagttgctggcaatgccaaatgaatgattcgtttctggatttgcatgtcttttggcaaatctgcatttaatttagtcatattctgtcactcaattcaacttgttgtattgggtgatcacccgtttcaaggccttcatttcttcctccaaatccgatccttcactaacatgcatcaatgcatgatccgcttgggcctccaagaggatttggctgattttttgaatggccgaacgagctgagttcaactggatcatgatatccccataatctttattagcgacgaccatctttttaatcccagagacttgcccttcaattttattcaggcgtttaagtaattcatctgtttgatgttctttggcatgtgacatgtcgactcctcctttaatataggggtaccccccacccctatattaatcaaaaattatttccaagtcaaaaagttttgtttaaatccttctattgctaaagtcatttcaattatctttcctcggaggtgctacaaatccgctcatgaatgagagaaacagacagcaacaaactcacttagtgcaacttttacaagtactgtcgttctatatagtaattttacactttgaatattgttttaaacactatactgtgagaaaatcaaagaagaaagatcaacttaaaaggagcgaatcaacatgcagccatctgaaaagccaacaacccataaaacgcgcaagccaaaacgtcttgttctcatcctcctccctaccctggttgttgtagtgttgggtctgttcttgaatcacttcaattactggccttttcagggtagcaaaatagccggtgtccctgatggtcagcttgttcaactagaaaataaaccagatttaacgggtttgctactggcatatggttcgcaactaaaattcaacaccacggcaacctcattaacagtctattttgatcactatcgcaaaggtgaattaaatactcatgactcagttgcttctttgacttatgaacaagatgtttccatcagtggctatctaaactttggtattgcggaaggacagaatcatttattggtgaagctattctccaatgacgccatgtcacaaacagtcaccgatctttccgactatgactttccccttacacaggaagacagacaatttggtgctgtgactactatcaaaaacggcaaagtgaaacttgagaaaaacaaaaaaatcccgctgctttatttagcagaaggaaatgatggactaaagatctatgatgatatggcgaataatctagcaccagataacttgaaaaccttgccaaatgcctatttgatttacctggaaattaaataacataagtccttataattatctaaattgaagcagctttctattttctatgaggagatatttttttgcaccaacaaattgtgaacaaaaagagtgctatttcttaattcgttttcctttacttttttatgctttttacttattattcttttgaaataagaataaattaaaataaaaaaggagagcaaacatggaaaaatatcaagtgtttcctggtcaagactatcaggcaaaggttattggctttagtggtttacaagatgttagcgttattcatgtttacgaaaatacagctacagtgttgattcaaggtacttctgaaacaggagttgcgaaactttgcaacttttcaatcaaaactgcatcattggtgggataaaactttcagagactgaggaaactgattttaggtacaggatccccaagacagaaaaaaggcagcccaattagtgttgcttcgttgaaacaccaaaatgtataaagtatttttattttatttattcaatatctctctacattatttgcaaataatgttaaaataaaaaaacaggagatgtatcaggcttcccccaagagaatcttccccaagtgctcttgcctggtacttcttccttgtttatttttcggaactacagaacaatggtaagccattcttctacgaatttcaagtggtcttattgctgagcaaaacaaagatttactattctatttccctcaaatctcccaataaaaaaacatttcttctacttttgttgataaatttccagctacggggatctgctgataatcctatcctcgaataaaaaaactgcgaaggcacttcttgttgaagcgtcccccacagtcgttatctatgacacatttctcattttgatttgaatccttctagtttggaatagtctctgtatatacagtcttctttccatacaattcctgtgtgattcctgaaagataatcggcagagttggtgctgcgaagattatacattaggaaaatcccgtaattttcagccttcgtccgtttagcatattgaatgctttgtgcttggtttcttcctacttctacagccgctggtcctaaacggtcggcccccattccaacaaagtaaggaacctgccaagagccataatatggattccagctataatcgatcgtctttgaaacattttcattatacattgaattctcggcagcgggaccaatattatatagtgtgatcagcttatctgttccaagacgatttctcaatgcttgaataagccaaatgaatgactgatcatttggttgaggtgtcccattcttcccgtattctgcatactcatcatcaaaatcgattccatctaaaccatacgttttcaccacttgttctagctccgcagcaaacgcatcagcactggcataatctgtgaaatttgcaaaaccagctccttggtgatttcctaatatcgataagagaacttttgtgcctcgtgcttgtaacggtttaatctgggtttccttttcggctagtgttttttgtacttgctcatttaaatgaagataggcttgctttgtcgctggatcataattgatattcgcagcaaaaatgatcccgatgtcgattgcaggtttgtccgttccggctagcgtatatttcccaatgtttctaaattcgttgtcattgacttcaacatacatcactgttttcggtgtgacttgatcggcagcctgagcttctaaaaccggtgcggccaaagaaaagagacttaaaagaaccatcaccacaaaagcaactgtgaatcttcgagatggtttcactgctagttgattcttattgttcactgtcaacgcctcctataataatcagatatttacacatcatttatgaagagtttttttgcatagagtctattgttctgctgccataagcgcagcttctttcaatgggtcatattcagggctgaccgcttcttcatacttagcagccaaaaacactcgattcacttcataatgagaagtggcacgttcgatttgttgacttaattcttgaacttggcgatcggaaaactggtcgttctttctagcaagataatgtttagcaaaagcttgcgactccgccaaagagcagccttttgattccaaaatcgccgtttttgtccagagaaagtccgtcttcaacaactgatcgtttcttccttggataccatcgcggccaatcgcataaagaaacatgcctccagtttcagttgtacggacataatttgcgacactatagagattgctggactcataaggttcacgggtatctccccatgtttgattggtacgttcttcaggaaacgagagaccgactaaatactgagaccgttcgatacctgtctttgagaacgtgttgttccaagaagactccgcccgcgtggcattcgatccatattgctgcgcacccaaaatactgaacgctgatgaaacaggagtaaatggctctagggaaaagatatctacagtatcataaatcagcagtgtatctgtgtctgacttcggtccaatatagtgtgagagggcctcgatcaccccatgggcgattttcagttgactggtagtataagtactttccatatcaaaatcaaggccatcgattcctggtgtcatatatttatctaaaagctgctttgcataatcgtcaaattcttttgctgttggttggctctgcgttgtaggaactttcaatagttcgcgataatctaatcctcgtacaagctttgttcctcgcttgtgtaattctggtccataaacattggcgacttcatcaaaaaagactttactatctgcatcactcacatttgcgtggaacacattgaccacatcaataccataaggaatatctgtcattcggatctgattattttgttcagatggaatactttgatctctccatgtgcggtaatagaccataaatgttttttccgatttatcaacagtcgtggcagatccctcaaccccaaacaaaaacccacaaagcaacaacgaactagcggcaaacaatcccaaaacgacttttttcatcaacatccatcctttcagaataaaatttgatacactttatgttagcgcttacttaatgaaatatctaagaacaaattataggtatttcataacaaattaaagatttttctttaaagtaaaaaaagaatgcactaaaaaatagcaacaaaagaagccctctattctcatgagggctttcttatccttttcttgcgaaacggcagtctcctaaaaaagaatggtgattttgataacacatttttagagcattgcttaactgcgaacaagcaattcaaacggtaaaacgatttgttccctactccgttcctggaatagacggaacgcttctcgtccacagaggtgcaaatggaattcaacggttgaaaagttcagtaatcgactgatcagtaagttttcttgaccgataatcagaggtgcttttctttccccatattgagataatattgtcgctgcgatttcatctccattggtaatgatcccgtcaacgccccggtctttgaaaaaaacagccgcagcctcgccatcttctgctttgatacaatcccaaaaaatgtcctcttctgaaaacccgggaaagagctcctttgctttagcgatcgtattgatcgaattacagctgagtcgtttgctgcggccaagagtcaagcctaaccgtttaacgccttgttctttaagataaaggatgctggctgtcactgagccaacttgatcgatcgttacaaatgggacatccgttccgctggcatcttcacaaaaaacgataggaccattttcaagataggggcgaaatgtctcaatatggttggcacgagtgatgacaatcaatccatcgaaccctttggcagcgaactcttctaaatagtccttctccaaggctttatcgaaattagttggtaaaagcgtcaccttatattgttgcgcaaatgcttcttccataatgccatttagtattctatcgaagaagggatggttgacaaatggtacgatgactcccacattgaatgtttttcctgagcttagtttctgagcgatcttattcggcttatagttcagttctttcatcatggctaaaatggtttgacgcttttgttcttccacatacggatggccgttgataacccgggaaaccgtagtgatggaataaccagtcattcttgcaatatctcgaatcgttgccataaacagttgctccttatgctatgtattttcactgctgctttatcttcctctgtctagttgtagtctaccataaaaggaatataaagacagattgtggggatgaaaaggaagatttctctaccataagtgatagacaaacaacccgaagtagttctttctacttcgggttgttgattattcttcttcattcctatctcattttttctacaaaggcttttatagaaggattttggcagccagcgtcaaaacattccaaaaaacgtggggttaacgcggtgcgaaccaaagctggatccagtgctttcaaacctgacagtagtggttttgccatcacttgttttacttcattcaatatttctgcattgcgattttgtgatgctttccgttctttaggatacccatttcctttgttagaaccaaaagcacggtcgaagattgtttccaggtttagctctgcgccccagccgaatcctttagcataaggcaaagacagggcattaccattattgatttgcaaaaaaagatatgcgtcggttggttcgatacaatacccgcatatcacaccgggataggcatttagagacattaatgcgccttgtccagtgccgcagccagtcacaataaaatcaatcgctcctgaatgaagcagcagtgccgcttgaatacctaaatgaatataagtcaaacgtggattgtctttgctgtaagcttctggcagatcttctgataataaaggttcactcatgccaacattataaacctcatgaccatatttgttgccgattgttgtcaattcatttaggataattggattctttgctgcctgactaaattcgttcaaaagtgcgattttcattcttttccacctcatttatttttaaaaaaagataattgaaagctgccaaagcgttttttttcgttttaaaagcggccattagtgagtcgttttctgtgaaatcggttaattcccgataaaaatgtttgttctgtctaatttcaatcggggtctgcattctagtggccagtaaaaagaccgtgtccaccatttcatcctcgtaccaaagaatgggttctttcaaaaccattattgctactttaggttcaaatacttctgtcatacttccatgtggaatcgctgtatgatgaccgatacaggtagttgtcttttgttcccttttccaaaccgtcagatagaaatttggcgatacaaaccctaaactttctagttgattggataaaaatgtcacgacttcttctttgtttgtatatgtttgatttacgaagatcaatcttggatccagcaacggcttggatgcatcggaaaaaatagagattgatccaggtacaattccccaacgagaaagagccgttcgaatattcacaagatctttgtttgaaggaagataagaaatcggaactgcagtgaccgaatctactggaaccatcgttaaataaaggacatcttttctggtagagtcaatttcttcttctcgtataatatgaatctctttgatttctggaatattttttttaatatattcagtggcaaacaaactttgggaacggcctcgatccgttactaaataagcatcaacttgactttgatttctcaatatagcggcttcgatatacaaaacgatgtaagcaatctcatcttcggttaactgtacattatagtagtcctcaaataattgacttgttgaccaaacactcaaaaagacgcgaccatagagttttttcaagtctcgggtcaattcagatgaatttttgtgcccgtatttcattcgaaaaatagcagaacgaagatggtttgtcagttcttcttccaaaattttgtcttccgtcaatggctgttgcaaaatttctgaaatagatgaaatgattgtatgaacaaattcaagcaaatcgttatcatactgattttttaaattagtgagtgctgccgaatccttccagcgcaatttatttgatacaagaatttccgcagtaagtattcttttatctacctcattgaatgttccgaatcctcttttttctaatccacgataaagggtttcaacaaaactatattcattggtgtattctctttcaaaatcatcaatcgttggcatatcagaggcataagaaaatcttccaatgctcaaaatcagcatgattcgtattttgataaacgaggtattagaaaatttgattttccaatcactttctgcttttcgaataatctcagagatttcttcaacagatattcctctggcaaatcgttgcaaaacaacagtttgtttttcatcttcttgcagaaggatcgcatctcgaatcgctacccgttttgaatattcatcacctaccaaagtaagtccttttccgggaatcgtttgaatcataatatgatgatcagcaaaccattctttcacatgactcattagttttctgaaagtaggtatactggcatataatttttcagctaattctacttgagtgataaagtgattactcgccctttccaacagcaaacaaattaatgtccattcatcattttgggaaattccttcaggtatagaaaaatcactgaaatgttttaataactggttttgtttatttggatagagcacaaataagatccctctaccaggcttcgtatcaattcgtccaagtttattttctaccaacaaatcatcgatttgggcgattttcctccgaatcgatttttcagatttgccaacatattcagctatttttttgatagaggtctccggatttttctgaagaaaacgtaagatctctctctttactaatttgtcttttatcaaatccaaagccctcctatcagattctgcctttcatcaactattcatgacccgtgtaagtaacctcgccaaaaatataacgatcctttgagccgattacctcaatgtaatctttcacaaattgcttgactcctgcttcagcagccatacataaatgcatataatccgtttgctcgtctttttttagttctctcatcatggcttcttttgcaacagtgaacgcatctgtagccacattgattttattgattcctaaagaaactgcttttcttaaattggctttcccgcaaccacttcctccatgaagcactaatggcatctgcaacgtttcttttaactctgctaaacgctcaaagtctagttgtggtatttttcctttggggtagttgccatgtgcggtaccaatcgcaacagctagagcatcaacatctgttttttgaacaaagtgtaacgcttgttcaggatttgtgtaaagatccatatttgcatcatcttcgttcagcgcttgtcctacatgtcctaattctgcttcaacagaacagccaacgctatgtgcaagactgcagaccattgccgtcttttgcaagttttcttcataagacagacttgaaccgtcaaacatgacatttgtaaagccttgattgatacattcagcaatgacttggaagtccatgccgtgatctagattcaacgcaacaggaatagtaactctggctgccagttccttgatcaatggaatcatttcttctttatgtgcatgatttttcatttgaccaggaccgaattgaatgatgatcggtgaacgctgttctgcggctgcttcgattcctgcacgcgccatttcaatattgatactattcatcgccatcacaccataataatttttattggcatcttctaaaattgatttcatacttactaacattgttgtcccactcttcttcatatgatcgcgtttcttattcttctaaagtaatgtcaaaatcgaaatcgtctgtttcactgttttctactgtttcagtttctgctaccgtttcacgtttgatgaccgcatagacaacgccggtaacaactgaaccgatcaccagagctacaacgaacattaatggattcgtcatcattggtatcacaaaaataccgccatgagccgcaactgattccacgccagatcctaccgctattgctccagcagttgcggatcctaatacggagctgatgatgaaacgaactggatctgctgccgcaaatggcagtacaccttcggttataaaacataaccccattggaaaagcagctttagcggtatcgatttgtgcttgtgcaaatttttttttggctaacaaagtggcaatgaatgccccgattggcggtgtcatccctccaactagtttagccgccattggaccgttgattccatctgctcctaatgcattggctgccagtgaagcagttttattgataggcccgcctaaatcaaatcccatgcaggcaccgattaccccaccgatcacagactttgctccgccattcagcgcaatgatccattgttggaatctatccataatgaaagctaacggtggcgagaaaatcattagaaacaacatcccactaactaaagtaactattactgggataaccaagaccggcatcaagccttgcatccaacttgggactttccattttttcacccaattcacaccataaccaatcacaaaagcgaccagcaagccccctaaaaatccggcttttgtttcattagcggtatatcctaaaataagtgctggtacaatagctggccgtccagcaatggaataggcggtgccagcagccataaccgcaaccgcaaaggccattgcataggaactcagcttgttgactccccaccaaaaacctgtccacgtataaggatccatctcagaaaacggcgtgactcccggttgaactaaatctccaatattgtatccgccaaacccttttgctagtgcccccaaaataccaccggctacaatgatcggaatcatatacgaaattcctgtcagtacgtgtttctttacctcaaatttccccttcatgtatgctactcctttccttgatcataagcctaatttttcatgaattttcttgattacaccttctggtgatttcatgatcaatgctatgggaatgtcaatgacttttttccctttgaatcgttcccgagatacgccaatatccgtagctagcaacacgatatctgcttcacgaatatctttttcagttaattcattttctaccccaatcgaaccttgcgtctcaattttcacatcatccccagcttttatggcagctttctcaattttttcctttgcaatatacgtatgcgcgattcctgctgtacaagcagtgattccaactattttcattttcttcctccttaaatctttaatcgatcgataacctcatcaactgagtgggttatttttaatcggtttaatagttcatcatcacttaattttgctgcaaccttactcaacaattgcaggtgtaattttgcaccagatacatcgtccggaaccgcaaacaaaaagaaaaaattaactggttgattatcgtaagattcccagtggatcattttgtttgttttaccgattgcgattccagctcgcatgaccgaatctgatttcccatggggaattgccacgttattccccattcctgtgatcccttctgcctcacgctcgtatacagaggcaataaaatcgtcaagtttgctgagataattttctttgtacaatagagtagctaattcacgaatcacttcgtcttttgtgctggctttcatatttagatcaataacattccgatcaaatattgtttgattttcattgactgtttccattctttcgctccttccatctcttattacacaaagaataacagaaaaaaagaaagcgcttttaaagaaattgggaagagctttgtggaatttttttctttgctgttcaatcatgactttcagataataagacctgggcatttataagtaaaaaaatttatagataaaaataaaagcccaaaattttttgggcttttcgggttagtagatttctaatattataaaattaattattgatggagaagaacataagccaaggaaataagtaccctaagtataatagtataattctaagccttatttgctctttccttaaacacatacatccagcccgttaggctaatcactaaactggctaaaacaagccaaaacccggaatcaatggtgattctcccctctgcaactagcttctgtgaaccaatgaccatgtctcgacagtaaagaaatgttccacctgcaccgataattagggagacaatcaatgtagtataaatttcacctttactagcattgtgtccaaaaaaactgccgctcaacatttgatagcctactatcacactacctacgatccccatgagaaaaaacgcaaaatcactaggattactgaaaaaacccggcatagtaaataataatataaatccaactttcaatccccacttatagctattgcttttcaactgattctgccgttcatcataagactctttttccattctactcactgatcgaagaagtaatccatacaagagataaaagccaagaataaataagactccaataaaccaatagcctacccaggtaaagaaaatcaaatttgctgctacccacagcacgtgtaatactttctcaaaaatacttgaccacttgtttttcattcgtttgtgcctccagtcaatttaaacagctcctccactgataatttaaaataatgagcaatccgtaatgccaactctaatgaaggattgtatttgtgggtttcgatggcgttgatcgtttgacgagaaacgcccataatcgctgctaattcgccttgtgataatccttgttcctcacgtatgcttcttaaacgattgatgactggcatcttctcactcctgtcaagtttcctttacatagaagttaccatatttcacagcttgtgtaaagattcctttacatttccgattttcgataaaatccaatctatcctccaaatacaaacttattccttcaaatgttagatatagcccctcattagtaacaaaataacttatcattctattttgacaatataatctgttaaaatgaatgaatcccacctataaaaaattgattggagtgtacgagatgaagaaagtattaatcgctcttttttccgtcggtgcaattttaggactgtcgatccatttctttggactacagatcggactcgcactttttaataaaccgatctatatgattccaccttccgtctatcgattaacaaaagatgcattaacaattatggagaattatggagtatatgcaaaagagacaggatttgagaaagaaataccaaactatctagctcaagtcaaaaaagacgatacgtttgatgatgttgtgcccatgctcaatgaagccataaaggaagctggtggtgatcattcagctattattgaagtccaagaggataaagcgccacttttcaatccagctctgcttactttccctagaatcttggcagaagacaacattgtgaccctcattttgccttcatttcctgctagtgatgaagaaaatgtgcacacttacgttactacagcactcgaacaactttccaagatttctgatcccaaaggtgtcattattgatctacgagggaataccggtggcaatatgatgcctatgttaggggcatgcgctcctttctttaaagaaggtaaactattcgaatttacttctcctaacaaaaaaatccccgtcttcaagaaagacgggaaaatatgttttgaagaagataatttaagtctaccaactaacttaaactttcatcacttgcctattgctgtcttaacagatcatcagactgctagttcagctgaagttgtactggttgctcttttaggacaagaccatgtttcctcttttggagaagaaacagctggttatgccacaggggtttcaatgattcctctttatggaaaatacgctttgtccttagcaggtgcaaaaatcaaaggttccaatgggatactgtatgaagaaaagccaattcttcctgatgtcataactgaccacccggaagatgctgcactaaaatggcttaagtccattcattaaccagcaatttgagaaaatccttactaaaaatactttttttccttagattctgacctactctatctcagcgccttcacaagcgctgttttcaagttaggatttttgaaggacaccttttttagcatagcgccgaaaaacacgatggaccagtttgctcgctaatcgttggataaagacggaatagttgagtaatgcgatcaacaaaatcaaattgatataggtcgtattgccgagattaaatagatctcttccgacaatcaatgcgataaagtagaggagctgtgtgccgaagaagacaaatgttcggtacttgctgtttggcggataaattttccgctggatcaagatgtaattccatgcagtaaaaatcacacacatgatcgataaagcttgaccactgctgccgaacaagtgcccgatattaataataagtaatgttccaattgcgattgacagcgaagccgggaaggcatttttgaaaatagtagacaaaaaggcgcctttgatccgattgaaatccggttcgaaattcaacaaaaaggtaggaatgcctacaaaacaagcattgatgatcgtaagttggatcggttcaaaaggataagcggtccccgataacagtgttcccatagtgatcaagatggagaaaagcacttgaaccaaaacgagcgaccctgagcgggtaatattattgatgactcttctcccttcatccagtaccgaaggcagcgccgaaaactggttttccagcagaactaaatttgccacttgtcttgctgcatcgactcctgatgccattgcgatcgagcaatcggcttctttaagagctaggacatcgttgaccccatctcctgtcatagcaaccgtatgattcatttcttttaaataaatgaccatttcttttttttgctgtggagtcactctaccaaagatctgatagttgccgactacctctttcagttcttcggaggtaagcgtcgaaacatcgatataatcagacgctccgggaagattgacttttttggcgatttgactaaccgtgaccggatcatcgccagaaatgatcttgcactgaatggcttgggatctgaaatactctagagtagctttggcatctgatcggaccgtatccgataataagaaaaatcctaaaggttcaatcgttgcaggtaactcatgattttcgcaaatctgagggctatgtgccaatacaatgacccgatacccttgttcagccagcgctcgttcttgttttaaaacaggggcatgctcgttggacaaaagaatagaggccgcaccaataaagtaggtcccttttccttcaaaagaaacacaactgaattttcgttccgaagaaaaaggcacgacatgctgcatcgcatacgtttccttctctggaaagaagtctcttaatgccatggccgttgggttcttgtccggtaaatgtgccagtagattttgtgtgatctctgccatttcttcttctgaggtaaaagggatcactttctctactgtcatttgtccttctgtgatcgttcccgttttatctaagcaaagaacatccactcgtgctaacgcatcgatacagttaagctcttgcaccaagactttttttcgtgccagatagacggcactgatggttaaggtcacactcgtcagtaaaaataatccttctggaaacattcctacagctgcggcgacagttcgcaaaatggctttgttgaaagaggcatgcgtaataaaatattgtttaaggaataacaacgtacacaatggaatcagaatcatactgatccagcgaatgactttgttcagacttccttgaatcaagtatttttgccacttgatcgttttcgcttccttattgattttttcaatataattttcttcgccgacgtggatgacttggcaaaatgcctcaccggctgtgacaaagctgcctgaaaacagttcagcatcaggttctttactgatgctatccatttctcctgtcaatagcgattcattcacttccaatgaaccttcgatgactttggcatctgccggaacttggtcaccattcttcaataacagaatgtcatctaggactaatttatggatcggcaatgtttctaaattgccatcacgatacacattgactttggcaacttttaacagcgccagtttatcaagggttcgcttcgaacggatttcttgaaacatgttaatgatcacattactaaaaacgacaaaaacgaataagccattctgataagaaccagttaatgccactaagaaaaagaggaggctgttgatcagattaaaaaaagtaaaaacatttgtaaaaatgattttcggatacgaattcgtcttatctttctttgatttgttgacttctccccgttgaatccgtgcttttacctctgctgaggttaatccatgtttgttttcgatgatgtctcaccctttcttcttatcatttgtcatactctcattccatcttacgtaagaatggctggttaatctataggacttccggttggtttttgcggaacttttattttttatagtctaaagaataatttatcctctcataaaagatgacctaattgtgtaaaatatagcataatatgctgctgcttggcgtttcatttttgtcacttcactgtcacgctttggcataatgttcctttctgacctcgtttgtttagtacttgaacattcagcaaccttgttctatcaacgatactcgtaatccctttctgctaaaataaataactagagaggtatcatcttttttgcgggttgttttttatctttagaaattctaaagggttggaatgaaagttaaaagaacacgcttcgacaaaaaaggctcaaaaactttttatcaaagtttttgagcctttaatgatttccgtttttttgatcagtaaattttcattcacaagtatcctatgacgctctgactaattcaaatgtttctgatccaaagagtcaatggcatgcatgagaccttccaacccagcaatgattttctcttttggtgcacctagattaaaccgcaggtaagtcttaccttctggtccataaaccttaccattcatgatcgcgattctttcttgttttaccagaacactttgcaattcatccatactataaggtaaatcttttatgttgatccagcctaagtaggttgcttctggaatagtgaaatgaattcgcggatcagcagacagtatcttctttgcttcgaaaaagttctcgtcgattgtttgattgagttcaacggcccatttcttttgattccgataacagtccattgtcgctagtagtgcaggatatggaatcgacgatagaccatctcttgctttcaatatcgtcaaaaatctttctcgtaatttttcatccaaaaagatagcataagagccacccagtcctggcgtgttgaacgtctttgatgcggaggatagcaaaactgcaggcacctctatcgaatcaataaattctaagataggtcgatgtttttctcctgggcgccggacatccatatggatctcatcactcaagatagcgacgttatgcatttggcatagcgaaaccaagttggatagttcttgatcagtgaacactcggccagttggattgtgcggattgcatagcagaaaaattgctggtttttcgatagcaaatacgttggctaaagcatcaaaatcaaccgtaaaccgttccccatcattggttaaggaaaatgggatcaactcccgttcgttaccggcgatacaatgataaaaagcatcatagcatggagtaaatgttactactttgtctccttttcgacttaatagttggatgcaaagagataagctataaatgacacttggcgagtagacacaccagtttggatcaatcgtacaatcaaattcctgcaaaaaccaatggctgatgctctgcttataatcaagatgattccagcgagtataaccaaaaaaacctctagtcacagctttagccaatacttctttggttccatcagggatcataaaatccatatctgagattgagaagggcaatagccctttttctccgaaacgatcttggacataatcccactgggtcgaatacgtgccgtagcgagagcgctgttctttaaagttactcaagatcgatccctccttcatccaaggaacgaataaccgcagaaatcaactcgatcgtcgcttcaacgtcattgatgtccacgatggaatgccacgaatggcaatagcgaaccggcacgcaaaagactagggttggtttaccggcatctaactgaaccgaaccagcatccgttccacctccggctaacaaatcatattgccaaggaatttgattgctttcagcaacttccttgcagtaatccaacagctttatatttcctaatgcggttttatcggccagaacaagacctggacctttgccttgaatacgattaggatagtccgcagcttttggcgtatctttcccattggctacatcaataacgatattgatatcggcatctacttgctgcgcggcaactttcgatcctcgtgtcccagcctcttcttgaacagtccccacaccaatgatttcgacatgttgcgttttaatctgatttttgatctgagccatgatcgtacaggcaacacgattgtccaatgctttaccaataatcttctgctgattataacttttcttggcttgagtatttggcaaaatcatatcaccaatctgcaaaccagcagcttccaattcaagttttgatttggccccaaaatctatatacatctcactgattggtactacttccgacattgcatgcgttgattttggcagcgttcccaccacaccttctatgatagagccgtttttacgacaagttgctcgcacttgctgccccaaaatgacatgcccccaccatccaccaatcggatagaagtagacaaagccttcctctgtgatacggtggacaaaaaaaccgacttcatccatatgggcatagagtgcgatttttttcttttttgttgtcaaatctccaaaatagaggtttccaaatgaatctttgacgccattcgaatcaatgatcgtcatcagcacctcttgcacttgtgactcttgaccaggcagtgcatctaaattagaaagacgcattaataatttatcggttgcaatcaatagttatccactccttactgaatttcgtcaaaagttcagcattccccagatcatttactaatatatcgtcctcgatgcgaataccgaatttttctttcgggaaatagactcctggctcaattgtgaacgtcatattggcttgaattgacaactcatttttgggtgctacggccggatattcatgacaagaaagaccaatgccatgtcccaaattatgactaaaatgatcctcaagtccctctttcctcagtgcttgtcttgcaacttgatcaatctctcctaacgttttattgaaagaaaccttttgaacagctgatttttgagctgccaataggatctcataagtttctcggatctcgggttttacttcgccaaagcctatcgtccgtgtgatatccgaataatacccgtcgtagatcgttccaaagtcaatcatgatcagctcattcgcttcaagttttttctgactagcatgggcatgaggcaacgcggtacgctctccggaagcgacgattgtttcaaaagccgggccttcgctacctaatttcttgctacgataatcgagttcattcgctaagtctagttctgtcatccctactcgaatcattggcatgatccgttctaatgtttgatcggcaatctgcgccgcctgtctgagggcacaaatttctttagatgatttgatcattcttaaactttccaccatgtttttggtggtgattagctgaccattggcctccttcattaaaaagtgaagctcagtaaaagtctgataggaaatggtttccgcctcaaaacctaccttcattcctgcaataaatggtcgcattacttcgatcaaatgacttccaatcgggatctcacaaatttccacaccagttgtttgttgagacgcttgttctgtataacgaccgtccacaaacaaagttaatttattttcagtaactagtagtaagccgtttgaccccgtaaatccgcaaagatagcgacgattcgttttatctgtgactacaagtccggataattttttttccgctagttttgctcttaatgcatcgatcctcatctattttcccctcattccttttctaacctgaatcatctttaatagttgattctcgtctcaagggtaaacaatatactcagaatagtaaaaacggggcacaagttcacaagataagtgatgaccgatagaatggtttcttttgcaagaggactagtaccccaatttaccagacaagattccccacactattgtttatccgctacttgttctaacttatgccccagcccctttggctagaaatcaatatctgttaagtattgttcatcttcatctgagatgactgagttgcctttttctgcttctaataatgcttcccgctcgaattcttgtttctccaatactttgaagaatggcaaatataagccaaaagataaagcgacttgaatcacttgaatgatgactgctcgccaatcgaatcctgtgagaaacccttccataaatattggcacataaggcggatcaaaaatcgggtagttcagtaaacctagtttcatacaaatcattgggaacattcctactaatgccccaccaaagataaatggaatcatcaaaactggattcaagatgatcggcacaccgaacaacacaggttcattgataccaaacatggaagggagtaaagcaactgcccctacttttttgtatcgttgtgacttactgatgatcattgctaaaactaagccaaacgtcacaccagaaccggtaaagttggcaaaggccgataaggtaccattcgtaatgacatggcgtaatggttctcccgcttcgtgcgctgcaatgttctcggacaaatattgcactgcgattggtgaaagaatcggggaaagaaccgctgaatggataccaaaaaaccagaaaaccaaccgtaaaactaatactagataaatcacccatagcgaatctagactgccaatagccggtgctaaaatatccatgatgacttgcggtaaaagaacacccccagataaactatcggtaaccgcacggatcacaataaacagaaccccgatagccgcagtgggcgtgatcaattcgaaagaactggaaacaaaatccggaaccccctctggcattttgatcaccaacttgtgcttcgtgaagaattggtagagtttgaccgaaataatcgctatgaaaattgcagtaaataagcccttagaatcaagatagctggcgacgatattgccgttgtcatccacatccattgctacaatcaaaaaggcaattgctgacaacatcattgatcccactgtataaagcttatagtgttcacttaagaaatacgaaattgctagaactgcatacaaaccaactaaccctaatgaaacttttgaaataatcccaaaaatataaccgtagctttcaaaccaatttgcaactccctgtgtagtaatgaactcaggaatagacggaaaaattgctgcaacagaccctaataatagcactggtgtcattacgaccattccttttttgatcgcagtcaagtaagcattactatcaactttattagcaaccggcaccaatgttttacgaataaatgcttctactttttcaaaagcaccctgtttttttggactttccatttttttcactcctaattattgagttttcaatgcttcattcttacgatatgcaaccaacgcttgtttcattaccgtagccccatccatggacccatagatatccgacgttaataaaacagttggtttgttcactttatctgcttcccctttaatgaaatcatatttgtgactcaattgtggcccaactaagatgacatcatagtcattgatatagcgttccaatttgtcgacaccgattgcctccattggatagtctttttcatctaagctttttgattctttgacaacttttttcattgactccatcatcattgtcgttgagaagcctcctgcacaaacaagcaatattttcatgtttctttcctcctactttttttttgattacttattttcttcgcttttttcctttaacataccaatcatttcttcaatcaaatcgcgtgccaataagcttgtcattaaatgatcctgcgcatgaaccattaatagactagtttctgttttctcgccattcagttcaccggtaatcaactttgtctggacatcatgggcatcaatactcctttctttggcttctttcatttttgcttctgcctgttcaaaatcccctttacgggcgaatcttagcgcttcaaaagctgctcctcgcgaatctcctgctgcagagatgattttaaaaatatcaacttctttttcgttcattgtttcatccttctttcattaaactttgtatataagacttaaagtcttgaaaattcgtgattttggctagttgattgtctaacgcttggtcttccatcattttgatcatcaatcgactgatttctttatgcagatttaaatgatctttcttgatattgatcaagaaaataaccttgatttcttttttactgtaccaaattgattttcttaacaaaatgacatcgatgacttccctgatcgctgcctgctccataggatggggtcctgcgataccattttgatagatggtatcgatcattttttctctctcaagaacactgtgcttaaatccctgctcggcccacccatcttctaaacgagccgcttcgctttctagtagttgcaaataatcttctgattccgtatcaatttgaaaccactgaggatcaaataaactgagaataaactggtgtacatcaaatactttattttccgattcccgcaataggcttaaatctttttcgattttattgatttctgcccgatttaaaatcgtttttgtgtagatgatagggatagcaaactgttcctgatccagaggaacagtggaaatcagtaagtcaaaacttttatcaatctgatcaacttcgttcaaagcaaatgtggtgacttcagcattgctgaaaagccgctctaaattaactttcaataaataagaagcaccgccacccgtagaacaaatgacagctatttttttataatcatcgattaactgattcgcctgcttctcaagactagctgcgaaatagatagcaacgtagcctatctcatctttgctgatatctgcgtccaagtccttgtttaattcactgatgaacaccatcgcaacgttgaatacattggcatattgcgtataaatgtcatcaatgatcggattatctagttgatgtccggtatacagtctttgaagtaatggagcgacatgcatcaacagggcattacctaattcttgatctgttctaaactgtgtatggtaacgtaaatcgacaagctctagtgttttttcaattgcttgtttcaattgctgattactggttcgatcatcaaggaccgaaaattttcctctcagttgctcatgcaaataatttttttccatagtagaaaaagtaatgggataagccgtttccaaataggagaccaaatcttctgttaaaaggtcatacttatcggttgctgtccttacggttcgttcgtcattcgttaaagtgttattttgtgtgattcgaaaaacaagcaatcgaatatgctgtatgatattctcaaaaacaatatcgctcgctttaagttgatgctgttgcaacttttctgataaacaggaacgtagcgcctcttcatcaaagacgaagtgaaaagctttatatcgttccgtcaggacgggggtatggataatgttgcgaatcaaataaagaattgcttgtcttttcttctcttcagtcccgacaatcttcaaaccataatgtgctttgctgaataaagttaatccgtagtccttgcaaaacaattcgacttgtttgatatctgctttaactgttgaaagacttacctctaaccattctgaaatctgctgcatcgtaatgtattcttcatgaaacagcaggagaagttcgatattcttaattcgttcgttcgggttcccgttatcgatcttttcttgacgttttgcatgagataaaaatcttagaaacttttttttatcagaaatttccagttgatagcctgccgaacgaatccgctctattgaaaatccttctgttcgtccgatatctcttaaccacttgatatcattagccaaggtccgctcagaaatctgaaattcagcggccaatgccttgggagcaattgcttgcttctttgcatataagtattcaacaattttttcttgtcgcataatttcctcccgccttcacataaactatacaatgtaagccctttacttaaaatggcaactttttccgataaatgatgcaagaataatctgattcaaaagaataaccatttccttctacgagcaaacgattcggtttacataaccgggatcgatcgatatttttctgaacactgctgatcctgcatcatttcagctgttagcctcattcaactactccattcgcattctaaaaaagataactaatatacaaaaacaagccaaaagcctcgttacaaagctgttggcttgttcaatacagaaccattattgatcgaatcgattcttctatttttgatcaagtatacttctatttatacaccctaatcgcaggaggcacaaaatcagtgacaaatgcgttgatttcggcaagtgattcggcgaaaagaattttgtcgaagtcttcttgggtcaagaacccttctgttaccattgcctggtattgttgtttcaatggatcaaaaaagccgttgaaattgatcagcacacatgggttggcatgttgcccgatcctgccccaagagatgacttctgtaatttcctcaatggttcccggtcctcctggcaatgccacatataagtcagccagctcgatcattttttgttttctttcatgcatattcgagacaacgatcagtgacgtaagattctcttttgctaattctcgtgccaccaagaattctggtatgatgcctgttacttcacaattttcttcaatagcggtttcggcaattattcccatcaatcccgcattaccgcctccatagacaaggttatactgattttcacctagccatctacctaattctttggtgatttgcttgtattcttctgaacttccgatacttgctccacaatagactgcgacattcattctcaaatgatcccctttcgatctgattgcacttcatgttattatagtcgagaaataaggagggctcaatatgaaaatcaatgaatacaactcatgggtgatcgacttttataaaaaacggaactggtatcaatatgatccttttattcgtgttggatttcttacggaagaagtaggagaactatcccgggccattcgcggcgttgaaattgggcgagatcgacctgatgagtctgcaaaagatcaagcctactatcgagagaatttgatggaagaacttggcgatgtctttgacaacgtattgattctcgcagataaatacgatattgctctcgaagacattatgggtcatcataaagcaaaactggaagagcgatttaaagaggaaggatagcctagctgctaactatcacttatatttcttttcctacgcgttatcttgcgttatcctaagttgtgcgcccagttgatcacctgtcattgtcaacgagttagctaagggaaaaatattgtcagattttctagtctacttgaagcaaaaaaaagggactgtgccataagtctcctacaagtaacactagccgaacattaatgattattgctcctgcggtgcagggactcctcgtcgcaaaagtcagagggatctatcctagcaacagactattattcggtttaacttgttggatgatgacttatgtcatagtcccgtattataaatcattattacagatcaacgattgaattttttgctgcctaatttcatatgaaattgcggatcttttggtgtggaaggatcgacacctcgcaaatgaggaatttctccacagatcaattgcaataagacaatgaaattgaacgtcataaactctggatcggtggtcacaggtaagaccagatctgctgcgtctgactcataagtcgtaatcagaaaaatagtatccgaccattcggacaaaacttctttcattttctcagaccttggctcatcgccgttgtctaaaataaagaccatcgaatcttcattgatcgcattatagatgccatgaataaactcttcaaattcatatccactcaccggacaacgcatcgtctctaacaacttcagggcactttctaaaacatctccataaatagctgccggacctgtcacacggatttcttttgcagtgactaatcgttcctgatttgcagaaatccattttaatgaagtctcataaacagcttggaactgtccagcagcagttttcaccccttggatctgttgttcaaatgtctcttcagaaatcgttcgttgctcaagtcccagatagagagcaagtaataatagattcagttttgtacaataaaagccctttgttttcgcccctgctttctcaggtccacaatggacagtcagaacaaaatcagccatttcatcaataaatgcttgttcttctcctgccatggaagcagtgatacaacctttgcttttcgctagtttcatagcgttgtaggtggaaaaagagctacctccttgagagattccgacaactaatgtctgttcattatcacttaaaaaagtctcttcagtgatcgtgaaaggatagaccgctcttacttcaagttgtaatagtttttgcatttgcggagccatttgcaacgcggaatgatagctcgttccagaccctgtcaaaaaaatccgagtgattttttcttttttgatacttgaaaaaagacggtctcctttttcgataatttctaacaatttacttggtgtctcttgtaaatactcttgaattgatgccattttttctcctccaatattatagaatgccaatcaaatgaacagcgatcccaaaaataataatgccgatcgtaatcttagtaatgctcgctttttttagcagcttataaatgccaaaggtgaaggctagcggcagcatctttggtaatatctgatccagtatatcttgaaccacgatttctgctccgctgatattccactttaatggagtcgtgatatttagcatcgtcgccaccatacctccaacaacacataatccaacgatcgttgctactgccataattttatccatcaagccctctttttggatacggtccaacgaattgacccctacttgataccccagtttcaatccaaagatccgaaccaatatatttggcaaattatacaaaactaaaaacagcaatggcccaaaaagattgccatcttttgcgatcgatacaccaataccggcagcaatgatccgaacagttccccagaagatcgaatcaccgatcccagctaaaggccccatcagtgatgctttgacagcgttgattgattggacatcaaaagccggattgttcgcattttcttcttccatcgctgcgctgatacccatgatcgttggtactaccgctggtgtcgtgttgaaaatttccaagtggcgtgtgattgctgctgcttgatcttctttatttctatagagctttttgatgactggcaacatggcatacatgtaaccgacattttgcatccgttcgtagttaaacgcaccttgaagagcaaaggaccgccagaatacactttttagctgcttcttctcaatcttattcaaaatcgatctctccttccgtcaagttatctgggacactggggatagactctttcttctgttcaatatagaagtgcaagatcactgcgatacaagcaccgattaaagcaatcgcagtaatatttagtcctccgtaggcagctgctaaaaagcccaagaaaaagaagggggccattttctttgaaaaaagcatgtccagcaacaaagcaaatccgatggcaggaagcagatttccagctacagataacccatctaatatgacatttggaacagcttcgatcattcccgttaccttatccgcacctaataaaatagctaagaaggttggtagaaatgtacttaaaaagaacaaaccaactggaatccacatacaaaaggctaatcctttgtaatttgcttctttcgcatagctatctgctttgtgggtaaaataagcattgatgatccgaaccaatacgcctaaagattgcgctaaaactgcgatcggcacagctaatgctaaagctacttcaacaccgctattagacaaaatcgcaaatgctgttcctaaaatccctcctgtcaccacatctggcggtgtagaagccccaataccggcgatccccatccagatcaattcaagttgcgccccaatgataattccattctttacatcgcctaaaaccaaccccaccaataaaccggtaacaagcggacgatcaaacatcatctgaccaaatattctgccatctaaaataccgattccagcaattaaccctaacattattgcttgagcaaccatcgtgtaaccctccttcttctaaatgtcaaagtccgtcaacaatttctttttatctctaggcagcatccgaaattctacttggacaccggcatccttaatcatttttaagttagcgatatccttttcgtccactgccactagatccgttaatttctttttcccctcgccataacgcaaacccccaacatttaatgtggtaattaccccacctgaagcttcgaccaatcggcgagcatcctcggtcgtcttaactaaaaccaagacattactcttttttgatgatgcaaatttttgaacgatttctccggattccgctactcctcgaatgtatagaacaacattggaaggtttcgccagatttaaagccatagatttcatttgatcatttttggcatcgtcatttaccactaaaatcgtattgatccctaaggccgtcgtccagccaaaagctacttggccgtggatcaaccgatcatcaatcctcactaaagatatcgtcattgttttgtcctccttgctgtttgattagttgattaatgtgtaaaattcctttcttcccttcttctattcccctaagtacccaatcctcaacagatagctcagctgtttcctctgagagtatgagagaaagtaacataggtaaattgacaccggtgattaactggaattcatatccgtttaataaatgattggtaaatagatttgccacacttcccccaaagacatctgttaggacgatcaacgtctgatcttgattctgctctaagtaagcagtcatctttgcttccgcatcatcactcgatttttctttggtcattgaaaaacaatcgatctcgatatcttcaccagcaatcaatttcaaactatcaataatccctttagaaaatgtgccgtgggttgctactaaatatttcatctcttttcctcctcactacacttttttataatgcaaaaagcgtgccaactagtgacacgcttcgaaaagtcctcatctatcagtcaagaaaaaggatattatggatatagcaaatttctggcaatggaatctgcacactatagattgtttccagcacactgaccgcatctttgatcactctgatttcacgttgatgagtaaatacaaattgttcaagatctgcaaattcggtaatttctacttgccgtatcaaacgctctaccatgcaggagatatgaacataaagaccgatttttcgtggattcgtcaacttcagtgctaatcgttcttccagtgtgacaattaattcttctatgatcgacatgattttttgagtatctaaaatagttaacgaatcgaggactcgaatgagggaaaaattttttaccatccgatcattcacaatcttcatgccattttcatccaaatcaacgccaaagatctctgacattttttgcgcgttcccaccagagataatggtttctaaataaacaaactcggcctctggaatcagaggatcgtcggttccaataatgcctaataaattatagtgttgagaaatactagcgggtatcccgttggtaaccaattcactatattccatagggaaaaacgctacctcaagcaatccttccaaacattccgacaacattttttgaatctgaatcgctgtacctatcccagtaaagcaagtggtgattatcgcttttttttgagccttttccggttcgaacagttgaatgttcggtgagatcgattccttcatccgttccgcaatctcggttaaaggagtgccttgaagcatcatattgccaatctctagtgccatcaaagtccctagctgatccatacacaaaattggaactgctacggtctttttcaataaatcatagatcatattcaacgaccccatatcaattaggattaccagtcctttgactgttccgttttctcgtacatactcttctacctttgtagagatgtcatgaatggaggcctcgattggcatatcaaagctggtaaatattgactctcctagcatgcgattacacacattggcgatactgctagcggttgcgaaaccatgagcaatgatcaatccatcaatgtctttgctctttcttgtataacgtagtgtcgaaaagaataatgagaagagattaatgtctaatgaatcgaactgaatatctaaacgtcgctcaatttcaggaaaaattttctttagcgtttgccgttctttcccataatgctgctcaatgtaggcttccagtaaaaattcagaaggctgagaaacgaaagacgttctcaaaatatacttgtaaatgtagtgagacacaaatagaacgaagcttccatcataatgaaagaacgcctgatattcgatttcccgaaataattcttgcatcgtttgatgcacaaactcttccaaagcaactggtttttgctttgaatccgtaaagactaaccgatccataaagccagccacttgttgatcgatcaacgtacgcatctccgcatcctcatcattttttctcaacgaataaatttgatttaatcgatgaataaacgcataaaggtcttgccggccatcattttcggaaagagattgtttttccccgtcgaaaacgtaattagttgactcagaaaactggctaacgattttatttcgaggaagcgtatacatttgtgcgggcagatccttgatggaaacatggacttcatctgaagtaacattttgagaaatcgcactgccgcaaacatacttaatggcattttcaatttcaccaatatttcctgaataaatggtatgaagaaaaatattcattacctgcgagctgaccactattttcttttcaagccgtttgctttcaacttgaaagagcttctcgataatttcttttttttctaaaatactgcgttcgctcagattaggtaaatagatagtaataggaattcgacgcaaaaacgtctgtaaaaaagcggtggttttctcagttgtcgcgaaggccaatcggacagttgcttttcgctcggttgattcaccgatccgagaaaaggtccctttatccatgaaagtaaaaagtttctcctgtccttccgcattcaaccgatggacttcatctagaaatagtagaccaccattcgcatcttctaataacccgcgcttcttttcgtaggcaccagtgaaggctcctttggagtaaccaaacaataatcctgacaagagttctggattattataatattgtgcacaatttaatactttaaatggggctgtttctgatagaacttctgctttgaccatatattcatacatgatttgcacgaaataactttttccgatgcctgtatcccccatcaccataacaggaagaccattatttggataaaatacagctgtcttcaattgttcaatgggttcagccaaacttttatcgtaaccgatcactttttcaaatacacgattgataggtactttctcgattttgtcgcttaactcttttactgaattcaggacttcagatacttcgatagcgaacttttcttgatacccccctcgattgccaaacaagacgggccgtgtattgattttaaaaaaaatgccttgatcaacaaaacgattggccaatcgactcgcttgtgttcgactaaaggagagttgagcttcaatatcggctgttgtaaacagtcccgattcaaccgcttctttagtagcacgattcgctaattctcggctccatgtagtcacttctacttcaacattcatttctacacctctttctttgccctcgaaataacaaatgttaaaaaagagtataccacggaaaaatttcttttaaagacgaaattaaacctcacagggaattgctttcatttatttgttatttcatggcctgtccaatgcctcatactttctgtttttattactaaacaacattgtcacaaaaaaacatcgaagctgctcaaaatgcgcttcgatgttctttagtaattttatttttacaatgaaccaagtttccatataaaaagctcattatcaacgaacgaataggattgtgttgttattcgaaaacttcttaatgatgtttgtagctggcatagtaaaagccggatacaaatagcgcacctccgatgatattcccaatatagacaggaataaaattcgcaaagaattccaaccatgtgccgtggccttcgaagatcgctgctggaatgacaaaacaatttgccacactatgctgaaacccgatggcaacaaaaatcatgactggaaaccatatcgtcaatactttcccagccgcatctttcgcaccataagacaaccataatgctaaaccgacgaaccagttacagccgataccagaaccaattgcttgtaaccaagacgcagctattttgtgatcagcaaggtgaatgatttggtctaaataaactcctgaacttgtcaatccaacaaagtgaccaaaaaaatacgccacaaagatcgcaccgaccatattagctaaggtaatgatcagccagtttttcactagttgcagaaacgtgactttcttatccataaaagcaatcgctaccgccatcatattccctgtgatcaattcaccgcccccaagcaggatgacgatcaatccgattggaaaaaccgctgctccaactagactggtgagacttgaaagtgattctggaatagaggcagagactctaacataggctaaatagccaagagagatcatagcccctccgataaatcctaaaataagtttcgcaatgatcggtttttgtacttttttggtgcctagatgaatactaatgtccataatttcttctggtgtgtgcataactctttgatccctacttttccaatagattttctgataaaaaacaatagtgatttccttcacatttccatcaacgattataacaccatcgtttttgattttgcattgttattgtaaaaaaattcacgaaattttcatcagattctattaaaaaatctccggttaaatcaacgtccgttgtttaccgaggaatccgtttgtttttgatctggggaagcactctagaagcaaatccccttcttgagttgaatatcttagaattgaatgactaattcagctcttttattattcaaagtcctttcctttaaatgcgatggcatccacttgaaacaagatgcctacctcaccacggtgcgcaaaagaagtctgaatagactttctgacagggtattgtccattaaatttttctttgatgattttttccattatcggaatatcaaagatatctttgaaaagagcgtccatttggaccacgtctgctaacgtaagtcccgctagtttcaaccgttcttccaagtgatcgaaagcaccgattatttgttgttcgaccgattgtccgatatttccgacacaatagccaacaaagactaaattcccagcctcaatcactcctgaatttgcccaatctcggttaatgtcatagcgcttcatctaactcgcctcctgaaataatctatttgaatttttgtctgaaaaaacagcctctggtttcttactaaaatacataaaattgttctgctttgttccaacgagatactcaacatctctcaatgcctcctctgctttttctgcacctttaattatcgcctaccacttagaaaatgaggcgacatgtttggtgttaaaaaagaaaggttgcgtcttgttcccttatcttcaacagtgaatcaacacagcgattcgaacacacgtggtccatattgctgctcgttcgatagctcttttcgctaatcgctttgatccctttagaaaataatcttcaaccaggcgctggaaaagcatagttacgtctcagacttttactcccaccaatgattacttcagcaaggcaaacaaaaaagctagttgatccttctatcaactagcacgagtggaaacagaccggcagccactactccccgagtcagaaacgaaaacagttaggtagcggtcaatgtctttttgctcactagcccctcctttaagcagcctgcgtatgaagatatatcgagaatttttctaaaagctgtcgactggatgatcttactaagaatggtataagtttgtcgatcgttctttctgagcaagtttaagatattcgttacttctgcgcgatcttctgctagaaaggctttaaaaaaagcaaagtagagctgcgtggtcagagagaaggtagaatcagtaagtgattccgtcaatttttcatctaagagtgaggccttttctaactcgttatttgtaatcaagaattgaatcatattgacatacaatgcgccgattagtcgatcaatcaactctgggtaaagtgaccaccacgtgattgcggcagcgatcgcttttgagagtaatggctcaattcgttcttcctcatcaaaaaaaataaaaaaagttgtaatgaacaattccagttccatcattgaaaaactctcaagacgtgtgaaatattctcttaaagtcactaaaggccagtgatcgatggtcggttttagtgaccaagccaaagcatatgctgcagagctgattaaccgatctgagcttatctctgacgttttgttatccctatagatcactaataacttatcgacagaatgcagattgaagtcatagtaaatagcaatgacgtctctaatcgtgattcgtttagttgcaggattctccttatcataaaggaagaaaaattctgattcactcatattcatattttctaaaatacgcttgaattttaatgcttcgatcgcgtactctcctgcttcaaatttcgcataaaagctgcgggaagcaacacctgaataaacttctttttgagtgtagtgtttcgccattctgatttttttgatcaatggtccatatgccttcatctgaccgctccttttcacgtatagtatactacacatttttaaaaactggggaacatttactgatgatatagtaacggtaacaaatggaaaggtggtgttcagatgaatacagtattaaacttacaagcttttaaagaagattctgccgtttctccaaattcaatctttacatttaaatgtcaaatctcactaaaagtacccgtaacaaaataaatgcgattaaaaaagaatagaatactccccctttgtcattctattcttttttaattagttacagagaaaggccaaagtcccccttgcttaggtttggtccttgtcgagcaaaaggggagtaaagccagtttttcaaaaaaatgaaatcaatacgtcaagaaaagagggaatcaatggatttcatcaatacattccacttcatctatcctgatctaaaaaatacatatacagatcaagcatttacttatttaaacattaaccagaacgttcccaagcaaggatggaaaattcatgtttctgctacttatactaattattttttgatactgagcgaatgtatctcatgctgtatcgaaaatgatgtagatatgaaatttttgaagaatcttgatcagtttacaaacaacctttctaaaagtacccctagagcctattcaggaaagttcatcacaatctatccctcaactttagagaagtttattgtgatgtgcgaaaagttatatacccgattaaatgattttcagggaccttacgttctttcagacaagagatataaagattgtaaagtcctctactacaggtatggacgttgtcgagcggacgaaaatgaatcagagacagaaagaaagcaattaatttgtcccgatggctctattatcgaagacaaacggttgccttattattctcagccgccttttgtacaagatccttttcatgatagttcacaacaagagaacccatctgcattgctgaataatagatacaaagtagaaacagctgttcattactccaataccggcgatgtatatttaggaacggatactatcggcaatcgaaaggtgattattaaagaagcgcgcccctatatcgaatcctcttcatcaggtgattgtattgacatgcgcaagaaagaaatagccttctttaacctttttccgcagtattgcccaaaggtttatgacagtttttacgagtgggagcattattttacggtagtcgaatttattgaaggacccaccctctctgagttctcagatcgagtagttgaagaagtgtatttcgacgatcttactggcagctatcgccaggatgctcaaaagataatcatcgagttaatgaaaatgatagtagcgattcataaatttggaatcacgattcatgacatttccaatactaatattatgttacgagacggacagccagtaatcatagattttgaaggtggaaaatttgcttttgaacaatacgattacatcgtaaagactcctggttttgataatggggatcattcaatcgacagaatgaagcgagattatgtttccttagggctcctgattattaaccttttcatcggaacaaaccaactggcgcaattggatcagcaagcagcactggagacattttatctttttgcttgtcattatcagctagaccgtcgttattattcactgatcagcaatttactattgagacctcattcgacgaaccttgaaatccagctccatcttatgtgcacccacccacttgaaaccgtctcattagcgtataacgaaataaaagaaaatctattagctgatgatctttccaacgtggataagaatgcagttcatttgatcgactcaaaaagcagttcggttgatttaacagacttagcaaacgaaaaagaactattcattttggcttatctcagttatttaatggacaatcaaaaaataacttttacaaataacgtagatttctcttttgaaaaaataggacatgtaaataaaaccggttcggttgattatgctcacttgattattcttgttttggttatgagtccagcagaaacgatcaatcgattgaaacctatgattcacctctggatacaaaaattaatcggttctcagaatcaagatggcagctttatttcagaatttgatggggttgagggagaggggcttcttgatggtgcagcaatgatcgtctgttcattggtggaagcttatcgtttttttcgtgaggaaagaatactccagagtcttactgattggctgaactatacagaaaaatttggcaagacacatttcccgcaaatcagtaaaagaaatgcgaataaatcaccttatttggcaaatggtaaagccggtctgctactggcaaaatggtatgttttgcgaagtggatcagggacagaagccatgaaaaatgaaacctttgagcaaataaaagaactgccactggtttcttcaaatgtcagctttggatacggtattagtggtatcgcctatttgaaagttctgacaaataatctcaaaagaaacgattacaactctctattaacgaatctactatcctactaggtcaatttcaaaggaaagaatcgatacccggactgcaccaattcaagaatagaagcgagatttctcacaggggaaatcggcgtcttattcttagtggattgtatccgacagagattggaggatcatcagtgaaaacactctataaacattataaaagcaatattcttaaaattttgttgctgtcaggcctcttatcctttttacgcgttctgccaagttatctactggcttttgccacgaatgctatctttgccagaaatatcagccaatttcttttttgggacctagtgattctcattctttggctgatttatgtctgctcaaactatttattttcagtttatcaggagaaagaactacaaaaaatcagtctttcattgcgaaaacgtgaagctgactctatcaagacagtcccattagcagacttcaataaaatcacggctgatggctatgtgtcgaagctgacaaatgatatcacacaaatcgaaacgcagggcgtgatgagtttatatcgtcttttttctaacggatggttgattttgttctcaattgttgcattggccctttttaacctttggctggtcgttttggtccttggtttaacgggattgatcctttatatccctaataaattcgggacagtccttgtggcgcttggacaaaagttatctactagtaattcctcttatacaaaaaggattgccaatatcttaaaaggttacaacgttttccgttacaataataggctggcagaaattccaaaaaagattaccgaatactctcaagacctttctgagaataaggttgccattgcaaaaacaaatcacaagattatgaacctcattgctttttctagtttattgagtcaagtagtcgtagatattgtgacaggctttctggcaattatcggacaaacgacgattggagctattagttccagtggcaatttagcagcaaacatctttaactctgtatcgttggtaggtcagtcggccatggaactaagatccatagagcccgtcatagaaacattttttgttgataagccaatcgttcgcgccacgaaaaaaacctacaacgaattcactgattgtatacgaatcgaaaatttatctttcggctatgacgcaaatctcccgatcctagaaaatttcaatttagacataaaaaaaggggggaaatatctcctcacgggtgatagtggcagcggaaaaagtactttattaaaaatcttgattggtgatttggaaggctattcaggcgaaataaaggtggatggtcatcagttgatggatatggatagccactcttttattcaatatatcgaccaagacaattatttgttcaacacttcttataaagaaaatgtcgctctttggaacaactacgcaaacacagaaatagccgaagcattgaataaagccgcggcagattttgtagatgatattgacaaagtagttgaaaacaacggtaccaatctttccggtggacaaaaacagcgcattggtttagccagagcctttattcaaaaaaaatcagtcatcctctttgatgaaggaacctcttcattagataaaaagaatacgttgctcattgagaatctccttttggaagacaacgagttgacggttgtgatgatcagtcatcatccactggaagaaaaccttcataaatttgatcaaattatttctatcagcgcccctttaacgcccgaatatcaacggatggccactgccgaaggttaacagttcatgaaccgtggagcaaaaaattctcatcattaaaagtcttcaaaaaagtgtcccccagttttggaggacacttttttagaagcctttttattcagattttaacagctggtgaaaagctgttcgcaactgctgcatcttctgtgtagcggatggttgatttgacgcattgacagaataataaattttaaactttggttctgtacctgaaggtctcagacagacccacgaaccatcggtaaatatatattttagaacattggatgatggtaatgtaattttttcgattgattgaccggccatccaccgttcagaagtcaggaaatcttctttagccattaagacaaaatcccccaaatgagaaaatgacagtgatcttaaacgatctaactgctgactcatctgcgacagtccatctttaccgggaaaaacttttgtttctaattgctcttcgtaataaccataacggtcatagatttcattcaagcgatcaactaaatcaattccggaaaggaaacagtccagtgcggtctcaactaataatacagctgcttgaatcgcgtctttatccctgacaaatggggctaccaggtacccaaaactttcttcatagccaaaaagaaaggttttatcttttgtttcttctgataattggatttgttccccaataaatttaaatcctgttaacgtgtttctaacttcaatgccataagcttcggcaatttttgcccctaaatcagatgttacaatcgtttttgcgataaatgaatttgctgcttgttttactcgaaccaaataatcaagcaataacacccctatttgattgccatttagaaagactggctgtccgtccttacgtacaacagcacccaagcggtccgcgtctggatctgtggctagaattagctgtgttggctgtgtttgagcctctttcaatgctagagtaaacgcctgttggtcttctggattaggagaagagacagttgtaaaatcaggatcaggcagttcttgctctttcactgtccgaagattcgtaaatcccaagcgttgaaaggccttttgtatcaatacatttccagtaccatgaagtggggtataaaccattgaaagctgtgagccaaaatggcggatcctttcaggattttgggccacctgaatcaattgatctaaatacaacgcatctacttctttcccaaaaatatcaatcaactgttgctcgacataagttgacaataaatccgcttcgatcattaattcattttgaatacttgctaatattcccatcaattcttcggcagttcctagtgtaatttgaccgccgtccgaagcatacactttaaatccattgtattgcttaggattatgactcgcagtgatcatgacacctgcaaaggctttataataccgaactagaaaagacaattgcggggtcggacgtaattgatcagataaatagacccgaatcccctgactggctaatacgcgagcggtccattccgcaaatcgtttagaaccatgtcgattatcaaaagaaatcactaccccctgttgttccgcatgcgctttttgaacatagcgagctaatccaagtgctgcccgcttaatggtgtagtcattgattcggttgatgccaacacctagctctccccgcatcccccctgtcccaaaagccaaatagtcataaaagtgttcttctatcacagcaggatcagacagagcgagcagctgatctttcaagtttgcttccaaagatggataatctaaccattcttgatattttcgttgccaattcattttgtttcctcttttaattgtttgagaatctctgcaatcgacaaggtgcagccagccattgaagtatctgctacgccataatacatcgtcaattgatcgccaatttgtatgccaccacagccaaagacgacatcgccaaagaacccattcttttcatagtctgcttcaggttccatgattggtttttgacttctagcaaggactctcgttgggtcttgcaaatctactaaggctgcacccatacaatagcgatgttcaggagtcgcaccatgataaataatcaaccagccttcgctggttttaataggaaccaacccgccacctacacgcccactgtcccaacaatcttcacgaatccctagtaaatgccggtgctgtccccagctaactaaatctggcgaagaagcaatccaaatgtcatagttgccaatgcttttcagagagggacggtgtaaggcgtaataacgcccattgatttgttctggaaaaatcagcacatctttgttctctggtgcaaagatattccctaaatcttgataggattgaaaatccttggtagctactaatgaatcacaaacacccattggtgagacagaactaaagttgatatagtaaatatcgccaatctgtgtgcatcgcgcgtcttcgatgccatatgattgatattcattgaaaggatacaagaatgcctcctcatcaatcgtaaaatgatgcccatctttactgcgggcaattcgaatataagaaagagatgtcagatagacaaaactatccaacttgtcttttttgcggatcattctcggatcgtcaaaatcataatctggatcatctcggtggaatgttaatacttccatcgtttgtgttcttgaatcaaatacaggcgctttaataacgttaaggtcgtcagagattgggcgctctgccacacgtaataaaagtaagacttcatcgttgtattttgctactccaccattaaaggcgccaatcacttcatacccttcatgtaatggtttcacatctgcgggagtgatcaatggattttcattaaaacgttctattttcatctgcttaacctctatctaaatggattttctagtttgattttctgcgcgcctgcatcactgatgccggcatatagtacaatatgatctttatatatatgaataccaccgctaaagacgacatcttctaaatctgggcgtttcattggtccttgttggaaatcgtttctttctgcaataatttttgcctgtgtcatagcaaattgatttcgttccagacagaaaaccatcgcataataatgacgatttccttgatcatcgaaattcgcgatatggcctaagacccaaatgtcgccatcaatctcatggatctcattgccgccaccccattcgctttcacagaactggtcagacagtaacggggcttctgtaattgtttcaatggtcaaatcactaagagtatgaacgatcgttgcacctatcttgcctcggccacctttagttccttgcggtcgtgtcagcactaggatttctccagaagataattgtttcaagcgcaagtctttcatcccccacggcccctcaaagattttctttgcttcggaaagagtcgccaagtgataaaaaaccgtacgccaattcgctgtgccatcttctagaaaaacaacttcaacccccccaaggatgacttgtccgtcaattcgagtataaaaaggatcctgtaaagaaagttcgatactatcagcgattagtgtccacctgtttgattcaacctcttcaaataaactgacagtggaaacttcactgtctcttgattcaatgcgacctgcaatcacttctttccccgccaattcaaaaggggcagtgatattataaacatcttgatcacccacaccgctaaatcgcaaaattgcggcttttttgactactttggctttctcatttcgatactcctgcaataattgcttgatataaatcatagctgctcctttccaatccaacatgcctttgccggcagatgaacccagtgaccatcttcacttaacatgccatttccaaaaatggtctttcgatttccttctaacgagtgcttgatcggctgtccaaaatttaaaataatttgtaggctttccgtttgataactcaagcaatctcctgttaactcaatgttgcggatggctgtaaaaggtccttctgtttttcgcaaccgaatcagtttttgataatctgccaaaatccccttcgcctcctggttcaccgctgccaatccgatccaaccgctttgctgatttgatagccaaggaagcatgcctctcgagcggtcacgattcacttggttggccattattaaagcgtgtgactttcctcttaaaatcagttcttcttggtatttattttttgcttgaatatccctgatatcagctagctgctgaggcaaatagtcaccgacaccttgttcttctccctgaaataaaaagggaatgccacgattgatcaacagaaacacggtcaataagcgatagatgtcgcggttttcatttgcaagccgctgccatgaacggctcatatcatggctgttaaagaacagcgtaggcattttcttttgttgactcatttctttaaaatccctagctagtttctcaagatccaatgcttccatgctgcccaaattaaaatgaaatgcggtatcgaacaatccatcttctgtataactgttgatcaatgagagttgatccgagctaatttcagccactgtaaaaattgatggatcgactgctttgatccactgatttaattcctttaacacacgtttgatccccggttgattcacatcattgcgatgatcttgtttcccatcttttcccactggattatcaataaattgatcactgaccgtcaaattattgatgacatcaaaacggaacccatcgacacctctgtctagccaaaattgcaagacatcaaaaacggcttgtctcacttcttgattctgccagttcaagtctgcttgctcttcggcaaagctatggtaataatattgatccgtagccgcgtcatacttccaagcagaaccacaaaaaaaactttcccagttgtttggttgatcttgccatatataccagtcccgctttggatgttctttgccactggctgattcgatgaaccaaggatgttcggtagaagtatgattaactacgacatcaatgataattctcatttctagctgatgggcttcttccacaaggagatcaaaagcggctaaagtaccatactgaggatcaaccccacaataatcggagacatcatatccattgtcaactttaggcgaaggataaaatggtgttagccagagggcatccataccggattcttttaaatagggcaatttttcacgaatcccattgatatcgcctattccatctccgtcactatctgcaaatgaggcaatataaatttcataaaatacagcattttcccaccacattcgttggtctccttacttcagtgtaaattgcattccatcttggaatcgttttgaaaaaatcaaaaacaaaaggatcaatggtaacgtgagcaacacagaggctgcatacattggtcccggatatgtcccataaggcccaaacatttgcgaaatcaagacatttagcgtaacagtggcgtcactctttgaaacgatcatatcccaaagcaggttcgtccaacgatccgtgaataggaaaagaaaaatcaccgttgtgatcgacttagacattggcaataccactttgaataacacttgcatttccgttgccccatccaactttgcagcttcgatcaacgcatcgggaatggctttgaaaaagttggtatacataaaaatcgcccataaactaattgcagtcggaatgatcattccagcataagaatccaataatcccactttggtcaccattagaaattgggggatcagcaaaatgatcgctgggaaaaacatttgaaagagaataaaatgattcacgaatttcttccctttaaattcgattttggcaagcgcataccctaccatcaatgcaaagaccatcattaaaaacgttgcgatcgtagccacgatcgtggtattcacgaatgcaccgatccaaggaacatctgctgaagtggccgaaccgccaaacagccacgtccaagaacgtaagctaaaagtggtcgggataatttttcgatcgacttgatcccaagcagcaaacgagtgcaaaacaagatagacaaaaggaaacgtcatgaggagcatcaccagggtggttactagatataggacactgttctttcccttcgttcgtttattgccaaccatttttttcaccccacttttctagtaacttccgaataacgccgatagatgcaaaagtaacgacagaagccattagtgcaactgcagacgcgtagccggatttcaaattaacaaaggcttgattgtagatttccatttgccatgtattggtcgcaaagtttggtccgcctcctgtcaactggtagacctctgtgaagataccaaagctgatccccaccgccagaactgtaaccgtaaagaatgctgggtacaacatgggaaaggtgattttccaaaaccttgtccaaggactcgcaccatcgattgccgctgcttcatacacttctttgttgatattccctaagcccgaaattaggatcagcgcatagtagccagacatcttccaagcgatcatcagagaaacgatgatgatggctgcatggggattacctagccaatcaatatcccagcctagtctcgttcgcaagaaggtattaaagggaccgttgtaggaaagcaatcctttgacgatcaaagaagtgacaaccccgcttgacaggtaaggcaagaagaaagccaccatgtataaccccttcagctttggcaggctgttgactaatagcgcaatcaccatcgaaagaaccagcgccattggtacaaagataatcagaaatttatatgtaacgacgaatgcagattggatcgctggactttttatcgcatcaataaaattctgaaatccaacaaattcaacggtcggtgaaatcatattccaactcgttaatgctagccaaaatgaccaaaataaaggaagtagaaagaaaatcaatgtaaaaatcagataggggctggtaaatgaccagcccaattttgtgttcttactcattattgtagcgccccttcgacagctgtcttcgcatcgctcacagctgttttcgcatctttttcaccccgaacaactggcacccatgcttgttcgccaaatacttgctgaatgtcattgtatttctcgttgtccattgctggaaccgcatacggtacattctctgcgtagactttcatcgctggattttcttcaaagtaggctttgaaagcatcgttttctgttgcatcatcgcgcgctggaataagcgaagtcatttctagtaatttcatgtcgttgttttcatctgaataaacaaattccaagaatttcatcgctgccgcttgttcttcttctgttgcttgggcgtacatcacgattcctttagcatctgcataggtggatacttgttctgcatccgctaaagcatcaggtaccacaggcgtagtaaccgtgtagttttcaccaaacttcagctctgggtatttttcttcccagttagggaacgtccaaggacccaaatcggtcataatactatcgccgttttcaaagggatccgttgcttcaccggtgcgcagtacttttgcatccgctaatgtatgcatcaaaccaaatacatctgtcatggctgcttcattagctgtgaattgattgttttcgacaaagctcgcaccttcactggccgcattgtagagtgggaagaaatcaaaccaacgcatccaagccgttggatctgctaagtcttttttcgcccaaagtgctttgtccgttcctttgattttgtcgacgactttcaataaatctgaataggttcttggcacttcatcaaagcctaattctttcaaactatctaatcgccagccaaacaaaatcggattggaataaacaggtagcacgtattgactaccatcagagaatttccaactatcgatggtttgactcatattacgagctttgacgatcgtatcgaaagaatcttgtttttctaatggtaaaatagcctgactagcagccaactgggcagcaaaactacgattgatgttttcagataatgttggtgcggtgttagaagcaatcgcactttggattgttgcttcagaagatggactttccttcatttgagaaacttcaactgtaatgtcttcattttgtttctcaaagtctgcggccatttcttgccaatacttcaattgtgttggattgggtgcagcccaaaaagtaatctttgtcttcccatccgttgccccagaaccgctctcttttgattgattgctacaaccagtgaataaaactgtcactgccactaccgcagcaataccaaaaagcatttttttcattttcatgatcgttcctcctaaatagtaagcgatttctttttacaccgtcatcataccacccgtcattttaattgtcaacattacgtaattataattacaacattacttttgtaattgttttaggctattaattttgtaacattatggtataatcaatataagactaggagaaataaggtgaaaatatgaaaaaagcctctatgcaagatattgccgatgcattgggcatctcaaaaaattctgtctcacaggcgttgagaaataagcctggtgtcagtcaacaaaccaaattactcgttaaaaacaaagcagatgaattaggctatcattatcaaacgatgaatgaagataccacgatgtcattcttattgatggcaaccgaatttgctttttctcaaacgagtttttttggcgaaatcgttaaaagtgcagaagtagaagctcaaaaaacagcgatcaaacttgatacttataccattacagaggaagacttacttagcctaaagcttccgccaaacttaaaaaagtatgacggtatcctgatcctgtctcatagtaaaaatgcctacatcaagaaagtaattgatactgggcttcctgtcacattgatcgatcaccatgatccttcactcacagcagatgccatcttgacaaaaaacaccgacggaacgttccaagccatctcacttctgattgaaaatggaatgaagcgaattggctttattggtgatacagcattttctcccagctatcttgagcgttatcgcgggtatcaacgggctttacgagaacacaatctaacacatgatcctacgattgaaatcacagaaattgaagaatctcaaggtgctttatttaacagcttaaagaatataaaacaaatgccagatgcatggttttgcgtgaattctgggctagctttcatgttaaacagttatcttcaatcttctggttacacgatccccaaagatatcagtgtgatttgttttgatgaaactgaatttacacgcatggcgattcctcaattgacaaatatcgctaccgatctgcagtttatgggccagttggcgattcgaacattggtccatcgaatcgcccatccccaagagccaatcgtccatcagcaaatcgttccgcagctgaacatccgagaatctgttcgacttattaaagcaaattaaaacaaagcgctaaattctcccacaaggtagaatttagcgctttgtttttgttgaatctattgtactggttacttccccctaagcgaagcaggcgaatctccaagagaaacgagagtcattggatcaagcagcaaaccagaaaagaaggcgaattaattcttgattgctttaagagatttccctctaattttccaaaaagaataacctgcaatcacgacggcaattccggcaaggatccacgggccggtgcttcctcctgtgactgtgatggtttgttcccctagattggcgttgctataagtgatcgtttgactgctggttgcttctactttcagctgttcaaaaggaatcgcaacttctacttcatctgagtaggaagtgtcactgaaatccgtttttacacgcgtaagtttcccgggaatcgttacattaacggaattatcctctgcccaaaaattgacttgcacgtctttggtttgtccaataacggataagtcttcacttggaaacgtattgttgaatgtcatccagaatactttgtttccgatcgtcagcttgtgtccactaggctgtaagttatggtaattgtgtccttctggtgccatgttcaaataaaaatatagatttgcttcatcggtgaccagactggcatgtttgatgttctgtccattttcatacgaaaaagacaattccgtcatcggtaaacctgaccagtcactgaaagcaccgtcaatgacgatcccgtatttattgtccgcatgggcattgattggtataaagacacttactacagctaagatacttaaaatcaatggataatattttctcatttttttgctccttctaactttcttcaatctggtgaaaagccgcctaaagaaatgaacatggttccttttggttttcattaacatattcctaggaaaggaaacttgatcgttacgaaatatgtttgatctttccctccataaaaatggcattgcgcccttctctttttgcgatatacaaatacttgtctgctcgcttgtatagatcttctttatcggtgtccgtttttcggcaacgggaaacgccggctgaaatcgtaactcgaacttcttccccttggatattcaaagaaaaattacctactcttttactaatcgtttctaaaatctctgtaatatcgtgttggcttttttcttgaaacaaaatcccaaactcttccccgccaatacgaaagacttgactttcaagctggtactgaaaaagggtttgactaatgattttagctacgttttttataatgatatccccgatatcatggccataatcatcgttgatccgtttaaagtaatcaatgtcgaccatagcaaaaactaaattttccttggtatgagaaagtgcaaaacgttggctaaactcccgatcaaaactcagccgattcccgatccctgttaaaaaatcggttcgtgcttcaagagataaattatcgaatttcgtcagctgccttcgtaccaacttattgatcatacgaaccatgatcatcagcatgacaaagtttagtaagaagaaaagatagccggcaaacctaaaatctaatgccggatacatctttaacccccaggacgcaccataaaataatgtcagcaagaaatagacaccgatattattcagatttttgtcttttaactgtaagactatccgacaacaagtgtaaatcagcacaatcgtgatgattgctataaaataattttgaatcgtctggtattccccttggtacatataataaaaggtgatggcaatagatacgaacacattgaagtgcagcatcatggttcttttgagcatatgcaaaaaataaaaaagaacgatcaattgtagatccatattttgaataagcgtggtacagcgatcttgcagaagattttccgataacacgggcaccccttgcaaaatcaccaaactgataatcatgataccaatccaagcaatttttctaagaacagctttcgttttcaaaaaaatggattctttcatcgataaataaatcaagtagtcaaggaatacaacacctagaacaacaattagacgaacgattgtataatatagccataatatgatatccatcaaacatagcacgctccttaataatcgatggtcactattttttccggtgtcgagtagagatagccttgatgataacaacaaacatttgtttctaaccaactagcaaatttttgattttcaattccctcaacgacaaaggtcttatctaattggacagcgatgcttgcaaacagcacgatgattttctgaagaatatcttctgaaaccttcttttgaaaagacaatgccgaaaatttgacgatctgaaaataattcttcaattccaaaacattgtccaaagagttgatgccttggccaatatcatctaatgcgatttggtagccatactgagcgattttcttgaaggcctccacattgactgcggaaaaataagggtaatttctcttcattggcggtttttctgtgatctcaataatcagtcgctgcttgtattcctttaagttctcaagtagatcaaaggtctcttcgtactccagttcttgcgggtcgagattaaaactaaaccgcttcgtcgggttggcttctaaaattcgggtcaatgttttttgcagccattttacatactgttgatgctcttcctgctggctgatcattgataaataagaatctttagggaaaatgtttttgttgtcttcttttctcaacaataattcaaaaaaaacaatttccttcgtctttgcatgatggatcccctgtccataaaattttaattcatcataattcattatttatcccctttgatcctttgatccagtgtaaaaattcgcttaacaaaacgtatactatcacccatcgtaaggcttgccaataataaaaagaatggtaaaaactggatcaaataacgactacgcccaccttcgaacaaaagcaggaagaggaagccgcctaccaaactcaaccgcagcatctgttcgtacttgccttgccgtttccaaccgaaagccatgataagcaagcagatcacccaccagatttgtgccatgaaacgaaaatcggcaatgcgatttccatataaataatagccttcttgcagccagcgggtaaagcctttgccctttggagtctctccttcttgaatgaacgaaccttctttcaaccacgcaaacgtcccatctgcggtattgttgcggtgcttctgaaaaagaaagctgatgtagccaagaacgcctctttcttttagccgctcttggattttctctttggagtaatcgatttttgcttgttttgttggcaattctgccattgcttgcgcatcttcaggactatatccaccgtcattcgtcaagccaatattcatgaaatggatcatcgggatggcgcggctttcatcaatggcaatgtattgttgattttctaattgatgattgcatacagcatacgtgccgccagccgtaatcaaagtaatcatcagcaaaacgatgcgcccttttgattgccatttcttggcaaaaaagctgattgcttcgatcaatagaacagcaatcaggaggatcagcgccgaaggtttgatgaaataaccgactaccgcagcaatccccaaaccaactgcacctaacaggttgtatttagtcggaagctcttttttgatcataagagcataaaagaataagcttgctgaaacaaaaggtagaacccacgtatctgtataaggcacaatgatcgaaggaaataccagtagccaagcgccatgcagataaatggcaggcactagatattttttgcatagcagacgaatcgtcagtatattgaataggacggagagatcgactaagaacaaggtgacagaatcaaagaacagccaagaagttgtagaaaaccattctgctaattggtgctgccacaaaagaatcggcaagttattttggttcaaactataataagcaacaatctcaggattcgttgtatccgtcaaggcatcatggatagccgcgacatcccagccgatcgccgaatgcaaaaacgagacgaagacgatttgccaagccaatactcctaagacgaataccgtgaccgtcacatagcgatgggtcacaaaaagccaagttaaaaactgctggacttttggataacagtacaccgcaatgatgaatgcaatggaccccaaaacgaaaaacgtggttgctaaagtggtgcttgttccaaagaccgagttatcgccgatcgtcatatttggtgaaatcaaagcaaagatcagtgtcaacccaaagaataagcaaaatagtccattgatgatccgattacctgcgataaaaaattttgatttcattttccacctcgacctatgcttgtttttcaatgcaataaaagcgagtaggcgattcccctacttcgatgcgaatcagttctgtttggatcgctgctagtcgtagggataattggtcataaaaataattggtcacattttcgacagagggattgatttccaaaaagggcggcatttcattcaaaaaactaccagagaaaggttggaaaaagtctttcagcaccccttctatttcttcaaacagatgcatctcatcatcttgagatttgatctcacaaataatttcccaagtatggttatgcttagcacccataccaccttcccagcgcatcgcatgactggcattcacatgagatttaaatttatagatacagcgtttttccgccatttgaggtcacttctttctaattttcattatatcttgggtgatagtgtctttgatctggctcatttctttagagattggcgtcgtattccattttgcaggagacgtgattccgttaatgattccaatcagacggaaccaagagacaaggaaattgtaaagtggaaacgtaatgacctctccccataatttcatgtaaaatcgctggtcagatttaaatgatttcaggagtaaagagatactgatgaatttgagcagcgagtcaacgaaatagagcaagtaaatcagcaaatacgacagcaacaatatttttgccgtataaccaaaaaacaataaaacggcgctggcgaaaagccaaatcatttttggaaaaatgaaggtatggtcgatgatcaggcggcgtaccagaaagtttttaaagaaattccctaagccgacttgttcttcggaaaactcttttgctacttctacctcacctcgttgccatctttgccgttggatatacaattcgtcaacactttgaattggttcaacataaaaaatagcattctcgcataaagaaactttttctttcagacgatgtctgatttgaaaagtcatatcagtatcttcaccgacagtgtctgtgttataaagatacgtattgaccaaaacttcttttctgaaaccagagaaagcgccagccattgtgaacaactgattattcaacgcttcgacattccgtccagccaaaaaagactgggcatactcaatgtactcacttttttgcagccagcgaaccataggtgatttggtctttttgattgcttctttttgcgttaagaccgtaccagacattgcagagatgctatagtcattctcgaacttcaaaaccatgttcatgagtgccgtaggttccaagaacccatcgctatcaatattgataatgtaagtcccaatactgtcatagatcgcggaattcagcgcctgggctttgccttgttcagtgcggatccaatgcatattcagctgattgaagtgattgtgcgcctcattgaatactgcaaaactctcatcggtactgccattatctgctaagagaatttgaatgttctcattcggatacgtcgattcattgatggaacgaatgcaggcatacagtgtctcggctgaattataaacaggtacgatcactgagataaagggcagtttttctggaatatccagttgcttcttttggaaatttttcacaaacaagtaacaggtggaatagatgcccgggatgatctctacgagtaaaggaatcaacagccaagtaatccagaaccccatctgcgtcaaggttaaattgaataagtaatccatcagtgctcccctctcctaaacaagcgattcttcttctcatacaaacttctggcgacttgagaatacgtaaatgtatgatagtacaatgtgatcacaagtccatagaagaacaatcgacccaaaatcgagtgagcgaggaaataagcatcgctgccgccgaaatgaacaaatgccacaacaaagagtaatctgataacattgcttgcaaaaatccacagcgttccaaaaagggcataaaacactttttcctgtcgattgtataaaggataaaaggtcagcaagcctaaataagcagccgtttcgatgacgcctgaacactcgtaatcaacatacaaagacatctgctcgttggcgctgtggatcacaatcaagctatatttgctgaattcctctgttacattggcaaacgaaccaaataaatccacgactttgatcactaattgtgtcaaaaaccacacccagtaaggtcggctgaatacaatcagtaaataaaacaggccaacacttcccagaataaaataaaaggctgagagtttggagcgtttcatcacagacaacaaatacagccaaacaactatgccaatcaatacgtatatgttcatttttcaaccctttttcttttttttcatcctaatcgttgcaacagtcactatgatcaacaaataacaatcttttttgagcatagaccattgtcactttgtctattttacacactaaaaaaaatgtaatcaatcaaatttatttcagaaaatggtccgtttttacattgtaaatctgcaaggtttacttgacaatagattcttgcaaatattaaaatcctcttattttttatcaccaaagagcccaaggacttgttaataaatactcatcgccgcctatttgtgcactcagttttctcaaattatacaaaagaaaaataataaaagagcattgacaagcacgctgtcaacgctcctttatttgaatggctgatttaccatctgaaaacacctgtcaaagaatgcaacactaaacagaaaaatgttcacagatagcgctgtaaaagggaagataggataatcgctgtttgttactcaatgaataaagataacaactcttccagactgtcaatcatctgatccgcctggctttgatcgacatcaaagggctgcttcagcgcaatcgtataaataccagctgctttggcagattgaatgccgattggcgagtcctctacggctgcgatctgctcgcagtctaaatggttttgtgccagttgatagatctccgggtggggcttgctttgagtcagctcttccccactgatcacataacagaaataagactgcagttgacacgccgtcaacatctcgtcaatcatccgccgtggagaagaagaagcaagagccatggggatgccagcggctgataactttttaagaaccggttttacttcttttcttaacgcttgttcaaaatcaatgggatgctgcttttgataagcgcgataagttgttttcagttctgctctcaaagaaggattctctggaaccagcatctgccaaatctctgcttctgtctttcccacataatcattgatcgcccgggatcctggtgacagctgtacttccgcaaagaaattcattctgcgcttgaaatagtagacttcactatcgatcagtaccccatccatatcaaaaataattcctttttgcatacctctgctcctatccttcgataatatcgttcagcaagcgcacttccaaatcagggacttggatcgtatattctttctcgatatcactgaatgccaaatgaatcaactccatttgttttttatgttcttttttataagccgccagatcttcttgttcatcgacagactctttgcgtaaaatacgttcaatcatacaacagcagtgtaaatacaagagaaacagttgattatttgaaaatttttgcgttcttagtttctcgatttcactgatggccgattggaccgacgtcaacactttatcggcatctaagatcgtcaagttctcaacgattttactgagggaaaaattaaagatcagatcttcttttagcgtctcctcttcaatctcaaaattgccataaaggcaattgataaaggtcccgatcgcctccccattgatcaaacagtctaaaccaatataaggaacatgggggatctgcggattctctgtgccaacgatcattaagacatcatagagttgaaagggaatctcatagtttttattctcaaataattttttataatcgtagggaatgatctctaactcttcagctttttctcccaagcagcgaatcaagatttcttgaatctgtcgtgcactgccgatccctgtgtaacagcaagtgatgatggcttttttcttcttgacgacaggaagaactaattgcttttgaatcgtaaactgtgcttggattttctcattaatctctgtcaaactgttcccagacaatacggcctgacccacttccaataataagggggtgttcacatggtcaataatcagtaatggtccttttagctgctttttcaacgactcgcccaactgattgagagaacccatatcgactaacaaaatcaagccatgatcagtgcggttctcgctgatataacgaatgatctgtgcttctattttacgcaatgaaatatcgatcggcatatcataggcttgaaagacatttttccccaatatccgattggccacattcgccaaactgctagcggtcgaatatccgtgagccaagacgacacttttgacgccagtttgaaccgttgcactattcaagctataaaagaagatcgtcataaaatagatatcctcttcttcgactgtcaagtctagattttgggacaagtggtacaagatctttttcgcgtaaaggtacggcgtctcggcaatattttttaaaaattcacggaatgtctctttcaatgccacattctcttttcgatcatcaaaataggcataattgcctttgatatagagatagtttgccaatgtgatcacgcgattgccgtcttgttcaaaaccatagctgtcatggagaaaatcgatggtttggcggatatgatacaccaataccgaataaatcgagtgttcctcatcataggactcttgaaaaataaacgcatccatgatgcgggtcactttcttcgatagccgattcatgtactctttgaagtttttgttgtcattgataacttcagtaaattctaaaaacatctcatcaaaaaattggatcagcagatcgttgctgttcgtgcttaaaagatttttgttctgatccgtaggcgaataatgccgatcgctggaattttttcgaggttttgtaaaattttctttgaatttgctgctgtattcgatcggcatatccaataatttgatttgaaccgtgggcttctgtttctgatggacataggcattgccgcaagcatatttaatgatattcttgatattgcccacgttgccatcaaaatcgctattcatcaaaaaatcgatcaattgatcagaaacggtcagattccgatctaagattttgctctcattcaggaaaaattcatcaatcagcgctagcctttctgataaagggcgttgctgaaaggtaggcaatgtaacgatcaccggcaaccttcgcagaaaagtgggcaaaaaagtggtgtaaatgttctctgtcgtcgcaaaaatcagccggacattggcttttcgacggacactattgtctcccatcggggaatactcccccgtgtccataaaggtgaacagtttctcctgcccttcttctgataaccggtggacttcgtctaaaaagagaatcccgccatccgctttttcaagtagaccgctatggtgctcattggcacccgtgaaagcccctttggtatagccaaagagtgcagcagacagcaattccggattattaaaatactgggcacaattataggcaatgtagggacttttcggctgcaagacgtgttcttccaatgcataggcatagattttactcgccaaaaaggtctttcctgaaccgctggcacctactaacagcaatggcaatccctgatttggataaagtaccgctgtttttatttgatcaatgctctcttttaaacttcccgttgcaccaatcactttttgaaaaacggactcaggagcgtccttttttagaaaatcaagggagtcatactcactcttagagaggacatagccttgatcttctaagctttttctatgtaaaaataagacgggatacgttttgactttgatcaattccccttgccgcacgccttcattcaggtagctgctgactgtactgcgattcagattcattgcattggcaatcttatttgccgagaaacaagccgcatcgatctcttcaatttttgaagtcaacttaaataaataattgtttaacgtcttcatatttgccactccctcattgaatttactctctttccaagatccatttattttaccttatcttgaggctttgatctgagaaaaaccaagcgatttctcctaaaatagcagattattatcacacgaatcccgctgctaattctgactgcaaaattgttttccgacaaatatcgatgcaaagaacctgcctcatcagcgacacaacaaggagatttgtatcgactctccgaatcaaagaaaaatcgcaggagggatggtactattccaacaaatcctctcgcgacactgtcacgagaggcctccatctttgcgattgttgggatcatttcgtcggttattgacttcaatcaccattttttagtaagttctttattagtaagttagtttccacatgtaacgtcttttcgtcaaaggatgttctcttgcttcagaaagttcttctgcatagactctaaacacagcggtgatcacaaatgggttgaagtaatcaagcacttctttgctgatatgagccgacaagccatagtctaaagcatcgactacttctgttttcgtatcaaagcgttctaagaaggttaatgcccgcgcatcgatctctctggtttttccatcattcatcaataagataaacggtacatctttgtccacgatctcgaaaggaccatggaaaaattcgccagaatggaatgtacctgaatggatccattgcatttccatcagcaagcaaatcgacgtggaataagccacttcatgggtcgcaccgctactcatcacataaatgactggttcatctttgaagcgttgagcgaaagcttttgcttgcttgcgggcagattcggcgctcttttgtgataaatcatagatagtagcaaagcctgccatcatggcatcatagtgttcatatccttcgatttgatgaagcaattcaactgccaattccaaacagaagccggtcttctccagttttgtggcataattttctgcaaagcgatggtagataacataatctgcatcttttgttaacggtgaatctacgcttcgtgttaaactaatgacagtggcacctttttctttcgcaactgcatttgcttcaacggtttcaggagtcgtacctcctaaagaagctgaaataacgacagtcgtttcatcaagggaagcaggtgtcgcatgattgaattcgttggctgtataatgactgatccgtaattgcttcgcattttggtcgagaaaatacttagctggatataggtctgctttagaggcgccgcagccaacgaagacaatcgattttacctctttctctttgacaatttcttggacaatttgttttggattcattgaatgaattcctcctttaaatttttaaccataaaccataaatggttggttcacttatgcaagtattcctaaaagactcatcacgatcccaccgatcaaacagattgctaacatccaccctgttttcacttttttctgcaacagccaatacatcaagaacgtgatgcctaatggcagaatctgaggcatgacattatctaagacatcctgtagcacgaatgcttcactcatttgaatcggtgtcgtaatcccgatcatactggcgatcatggagccaattaccatcaatcctacaatggagcaaatgtacatcaccttgtccatcaagccttcttgataaagtttggccaaatacttgtttcccatggtatagccgatcttgcccccataataagtcacaaaaaaggatggcaagaaggaaacgatcatggctaagattgggcccaagatactgccttgctgggctaggttgattcctagaccaaatgccaatacgcgaatggttccttgaaagaaggaatcacccacccctgataacggtcccatcaaagaagtcttcaccgcactaatagattccggattgaaactaactggatcttcgtaatattgttcttccatcgatgaagctaatcctagaacaaaggcacttgtttgcggcgtacagttgtagtacatcatgtgtcgttcgtaggcctctttttttctttgctcatcttcaggattcttatagatggcatccaaaatcggtgcgataccatacataaagcccatattcatctgtctttcatagttccaagacgcttgaatcgcccacgaacgccagaaaaactgacgatatttccatgcatttggatctttctttttcatgaatgaacctccttataagtcatctaatggatctggttcttgcggcttgcctgctcgatttcctaattgaaccatgacaaaagccacaatacaagcaaaggccgcaactccagtcacacttaaaccagaataagccgtgatcaagaaccctagaaatagaaatgcgaccatttttttcgtcagcatcgtttgcagcaacaacgcaaacccataagctggcaaaatcttactagccaccgtcaagccatctgtcagccattgcggaatagcctcaacgacttgtgtgactaagttcgtgccaaaataaatggccatgaatatcggaatgaaatacatcagtgcgtataagcccgtcccatagaaaatatgaattcttcgggcttgattaaacttcccttgctcaataaatttgtctgccgcgtgtgtcaaattcgataaaatcgttcgcatgagaatcccgagcatttgtcctaaaacagagattggaatcgcaatcgtcaatgcagcctctgcattggcatttgataaaatagcaaaagatgtcgcaatgatcgacgccatattcatgtccggtggtgctgccgctccaatattgacaagtcccaaagacatcaattccaatgaggcaccgacgatcaaccctttttccaaatctcctaacgctagaccaactaatgtactaacgatcaaaggtcgctcaaagttcaaccttcccaacagccgtgaatccaaaatacaaaaaacaccaattaaacctaatacaatcgaccgaatgagcatttttttcctcctttatagcattgtatttaaatcctctttcttagaggttggtacctgctgcatatactgcacgatccccagatctttcattttgcgtgcatcttctgcttccgcatctgtcaaaaaaatggcattgctgtattgctttgaaccggcttttttgatgattccgccataattgatctctttgactttaggatatgcttcgataaatcgccgcgtctcatgggtattcccaaaaatgatcatgatgttttcggcgagttgttcgatcttaggcattttagcaattagttgatccgttgctaaaatcgtcagcttgatacccgccggtttggaaagattcaacgacatcttcttgaattcatcattggcagcttcatcgtttgcgacaataatgcggttgatattaaaaaacttactccaagaaaaaacaacctgaccatgtaacaaacgatggtcgatccgtactaatttgatcataattcatcctcctctgctgttgcttcgactagtaatttcttacaattcacaatagattgctgactttcctgaataatagctgctaattcttcttgcgagactcggttgacttgtgtcgcaagcgtgatcaccaatggaagattcattccagcgatcagttccaaatcggggtgctcttgaacgaccctcagcaggtcgttgttgacactccctccaagaatatctgtaagaatatacgtgtctgccaagtctactttggctaatatattctgaatttgctctgtcatcggttgatcttcgtctcgaaaagcagataatgcataaatgttcgaatgatctcctataatcattgcagcagtctgttttaatccttgagataactctccatggcttgctagaatgattgttgccatatcattaaccctcctgtctgtttacacctttctataagcaaaagtcgtgccaacttcataaagcgctgtcatagcaaggattctatcagcattcaacactgggaaaaagcgtgctgagagagtgttgggcgggagtgttggagggcagtattggagagaacattagaaggaagtcttagtttattgcaactcttggtgtaacgacttgctgccaaaccaaccgctgataaactgataaaccaaaaaagcgtctagacaagcaaatcattgcctaggcgcttttcttaaaagataaatgttgtatcactgtccatcaaacagaacacttctttacgggtatatgcttgcggtttgctgcatgataatcactgaaaactttcttcgatctcatttagatgaaaacaagcaacttccgccgccccttgttggatcaatcggggtttttgcatgtggcatttttctgtcgcgtagatgcagcgaggatgaaaaatgcagccagttggtaattgcttgatgtcaggaatatccatacctttcaaaggcaaatctgggacagtgtattgccggttagcgactccttgcgggacggctgctactaatgcccgaaaatatggatgattcggatgattggtggcttgtcgaatatcaccgacttccatcacttctcctaaatacatgactaagagtttcccacgatctgaaatataacgggcagtggcaagatcgtgcgtaatataaacaaaagaaattccatacttctgattcattctccgcaacaacttcaacaaggagatccttagagacacgtctaccattgaaacaggttcatctgccacgatcaattctggttctacagataatgcccgtgcaatcagtacacgttgccgttgtccgccgcttaactgatgcgggtatttatcaatgaactgttctgtaggaaataacccgacatcggctaatagcccatgcactttccttcgcgcttcattctgatccttagcgaatccatgctttcgcatcgctgcttgcagtgaatggaaaatcgttttgtaagggttgagtgccgcaaaggaatcttgctggatcatttgcactttgaggcgatacgcctgatattctttctttgtcatcgtgcgcaagtcttgacctttataaagtacctttcccgctgtaggttgatggagatccgtgatcagctttcctaatgtcgtcttgccacagccgctttctcctactaatgccaagctttctcctggagcaagcgacaaatcgattcctcggagaatcgctggctcatttggcgaaaaagctttgtggacagctactaattcaagtaatggactcatggtcttcctcctgtacctgtttgaagtggatacatcgcgcagcttgttgtttactgacaggaaaaagcatatggcaagtctcctcgctgccatcacaagcaatgcgcacagcgaaagggcatcgttctttaaagcggcaggtcgcgtccgctttagctaaatcaaaagccactccttgaatcgatgaacgtgtatcaatagcatccgtcaagctaggaattgccgccaataacgctttggtatatgggtgggcaggatgcgtcatgacggcactcacctcgcctacttctaccagttgtccagcatacatcacagcaatacggtctaccattgaactaacaattgatagatcatgggtaagaaaaacaatcgtaattcctttctcttgattgattttccgcaaaatagccagaatatgccattgagtaatcacgtccaacgctgtcgtaggttcatcaagaataatcacctgcgggtcaagcagcaaacttaatgcaatcagcactcgctgcttcatcccgccgcttaattcaaagggatacatttttctgactccttgatctaatcgcacatattgcagcaaatcattgattttggcatccagtagagcatcgcccgttttttgatgggctactgctgtttcatagaaatgttcctctactgttaagatcggattcaacgcactttgtgccgcctggaaaaccgttgcgatctcccgccagcggtaacgattcccttcctgtgaaggcaaggaaagaaagtcaactgcctccccagattgccaataatatacttgtccagccagtatttctcctggctcatcaatcaagtttaaaaggccaaaagccaatgtggactttccgctgccgctctcaccaatgattcccagaatctctcctttttcaatcgttaacgatactcgatccactgcattgatcgttccacgatccatctgcttcaaaagcatctccgaagcttctgatccccctcgttctccatgcgcgtttgaacctgctggctttagttgattctttcgtgacggcttgtcaggattccgactgattcgccattttgatctacttttcgaagttgcgtgacgacgaaaccctatagttagctggtttgcttcaagtatcttacccatcgatctcactcctaatccttggattaaaggcatcttctagtccttttgaaaaaagaaagcaggctgactggaaaacaacgatgccaacgatcggtgtaatcaaataaatagcagctgaggatccaaacatggcaccggttttggtcattgccaaattcagcatgattccccaatgctcccctttgaaaggtgccaatccaagcaacatcaagccgacagaagcaagaaccgatgcccgcatgatcaagacaaaattgattgcaatataagggatgagactaggtaaaatatcttgccgaatcatatatcccttagacattcccaaaagccggctagccagaatgtactcacttccccgcaatgtcatgacctgactccgaacgctgcgagctaaccctgcccagttccaaatcgccaaaagaaaaccaaaagccagaacatttcctgcactgatcaccaaagaaagtgccataagtacgggaaaagaaggaatcgtcaaaacaacattcgtgaggaacatcaagagtttatctgttgctcctcccacaaatcccgcaacaatgccaatcgacatcccaatcaaaatcgagaaaaaacctgaaaataaggcaattaggacgacatccctcgttcctaaaataaactgcagcaatgtatctctaccagtaaaatcggttcctaaaggatgttgcaaagagggacctaataatcgattggtataatctgcgggcaagtcgccaatcagccattgcccaaaaagagcgaaaccaactaaaatcagtaataaatacattccaacagccgcttgacgatttgcacgaatcactttgataaaagaagacaattgtttcattctgtctgcctccttaatcgaggatccaaatagccatatagtgtatctacaatgacattggcaccaactactgtgacaatgatcataaagaacatcccttgcatcaaaggaatatcacgcaccgcaatagctgtgttcaagtaatagcccaatcctggataagaaaagatgttctcaatcaaaggcgcaccgcccaataaaagaccaaaagtcgttcctaatgtagtaatcatgggtaagcgagcattcttaccgacatatttcttgcggatcacaccatcgctcaacccacgcgcacgggcatacttgatgtattcttggtgcataacattcatagcacttccccgcatattcagaatccagttcgccaaataaacaacaaaaatggcgctgataggcaatatcccatgacgtgccacactaatgagaaacggaaggttcaaaccaaccgtcacttgtgatccataggcaccgcggctcggcagccagacaagctgcacggcaaacaaagagaccaagaagaaaccaatgaggtaatccggaaacgagccaaccatggaggtcagtgtttctgtcaccgtatttaagcgtttattcttggaccatgcaaccatcaaaccgattcgtgtacccgccatgtaagaaagaatagtcgccacgccagctgaaaaaagcgtccaaggcaatgcacttaaaacaatggataaaacaggcgtccgaaaacgaatcgaagtgcctagatctccttttaagagctgcagaatgaaatggctgatctgctgcagcaatggctgagatggatcataattcagcatactgatcgctcggctcatagcatccgcttctgagattccttgcgtacttcgcagctcatttgccaaaatcgttactggatcgccaggcatgattttgataatcaaaaaagtcataaagacgcctgcggttatcgtaaagaaaacattcgctaatttcttcatttcttatacacgcctccttccagtctatttgtttaatcagtgattcccatgctcttttgcaacgttccttccgcaatcaatgaagaaaacatcgattcgccgacgccaataaagcgtgggtcttgaaccaattggtttgcaggaacttgaaagtcaatagccggattaagaacccgcactggaaagcctttttctagataagggatgaacaagatatgctcatttgtcactgccatcaactctttagtggccgcaataaaatcgtctccctcactgtcaaacagatgattcgttaaagcgatcacatcaactttcccttgagcgttggtcaaatataattctcctgttggctccgtttcaagtccgaatagccaactgcggcccttatataattgttcatacgtcccataaggattggcataaagaatattagaaggcggggcaaattcgatagcaacggtgtgctctccatttctcaaatacgcatcataagaagcgccttccattggcagaaatgtcacatcaaagccaaaactattcaattcattaacgatcgcttctcccggcaataaagctgaaccccagccattattgcaagcaaaatcaaaggccactttatttccttgcgcatcgatccaggtatcttcttttgtccaaccagctgctaataagacggcttccgcttgctcaacattgtattctcgtgcggtgagctccgactgcacccaatctgtcaatccgtaaacttcttgtaaagaaagcggcaatcctgtactccccgtctcacttggcatactgccgacttctgctaacggaagaatttcatcaggattcaccaaataggccacagcttcgcggaaagccagctcctgggcaaaagcctgctttacattgaaaactacggacatttgtgaatactctggtaaataaaattcagtaaaatggtccaatttactttcaacttggcgaatcaaatcttctgtcataccgccactgtgcatatcgagagtcccatcgatcatactgttggcagctacttcaggtgtgacagcgcgaataatcgttaatgaatcgatgccagtctcttgataaaaatgttcattcttctccaagactgcttcactggtagaaagagcagcaatcgtaaatgcgcccgaaccaaccatatctgtcacttgcggcatatatccttccaattcttcattaaggatttgtaattgttcatttcctgcttctgaataccaatacgtattggtctcatcatgccattcccgctctgcatcagcgatgccttgatattgctgtgcccaatcaccgtattcctcgaaacgagcagatacctttacatcagtcagtagattcagcatcaagtgactttcatttttaaaataaaacgccactgtttgctcatccgggacttcaattttctctaaaaattcccaaatctgtttcttaccaacccacatttggtagctggtcagtacatcttgggcagtgatgtcgctgccatcactccatttgataccttccttcagtgtgatattgatcacattttgatcaatgctgtaactcgaagctagcctaggcttgaaattctcgccgccttcacctactggggtgaatgaaaacaacgcttcttgcacataaggttcaatcccaccaccaataaaaccactaatatagggattgccatgggcagttggcggaacaacataatcgccattgatcactaatgtttgagagtcctgcgctgtttgatcggtctcctttgtttcttctccacaggccgttaagagaaagaatgcacccaagcaaaccagccctttgaattttttcatgtgttcactcctcagctaatatgatccctgttgatccgataacgattgacggattgtctccaatgactatcggatcaaccataggtgaatagaaaccaaggcttgccaacttctggacctaggatagaaggattgttcacccgacgaatgtaacgacttactattcgttcagctatgactacctatttatcagtaagcattatcattacgaggcttttatgcctgccatttgtcaaaaacgattctgcgcatgaatgtttagacaacaaaaaaggcatcggacaagactgtccaatgcctttgacatagcaaaataagcgtctagcatcccgcgaaaatttaccaaaaaaacaccccgctactagaaatgaagggaaattttgggtacaataaacacgttgatgccgatggcgttcaactatggcaacttgattggtcatcttggttaaagtgctgactgatcagggcctcgccgctctgcgccaacagagttgcgaggtgcctatttttttggtttctattcggttataagtgtagccgattttggaaggggttgcaagcgaacatcagaggaaaaacgaacaaaacattcaaaatatggcagtattttattgagatatggagattatccttgatatttctattgttttaacaagaatcaaacggatgtacaggacttgctgctcttcttttaagaacacaaaccgtagggcagttactggtctttgttttgttccttctttcgcagtgcttcgtctaataagtaaatcacagtcaaatatttatccttctctttattaaaaggaatacgcaagtaatacccagcaatgagaaccaacaacaaaaacacaggtaatgtgaattctggactttttatttcgaatgtcaaagccaacatagctaagataatcgataacgcagacatcgagtaggacattttgtcatatgatgtaagcagctctttctctgtattagaaaaacgtgtgctccaaaatcgcaaaataaacgcatcttcttccgcaaccctatcaatcagttctactaattctgcttttgtgcgcgcttgttttacatgcgtgtataagatatcttttaccacttttctttgattcttttttgtatagaaatcaaacaaaatttctgataaacaatactgagcgttgttctttggtctaaacttctttaacatctacttcctcctttggtattataatcgcagcataccataaatatttaatatcaaactatataattttatcaaaaagttaaactaatttttcaatgcctgcaactccatttcattggatttaccaacctaaataatactatgtaaatgttactcctagtatgactctctacacaaaaagagaccaaggatccttccgattctggtctcttacgtaaaagctattactcacaactcgcggtatttcttcttggaatccttgctttgttccaccggatatttcaccgcatttttctgcagtttctctttgatgatctcatcaacatccagctttagattatccgccagcatataaatgttttcattcctacacttcctccccaacaagcgtcaagaaagcctcttcgagattcttcttattcacttttaatagaatatcagctaccgtcccgctggcaacttctttgcctttgtttaacacgagaatccgatcacacagcgtttccacttcatccatgtaatgagaggtcagaaagatagtgacccccttgtctttcaaagcgagcaagtatcgccaaacctcgcgcctggcctgggggtccagtccggttgtcaattcatccaaaaaaatgatttgcggattccccatgatagccaaaaggatacatagcttctgtttctcgccccccgataatgttccgagaaatgaattcaatttagaggcaagaccaaattcatggagcgcctgcatccagtttagcgggttttcgtacaacgaatgggtgatttcgcaaatctctcttacctttaattgattttgaaaggcagattcttggaattggacccctacatactgaaacagtcgtttccgttcagccttaggatctcttcccaaaagcgagatccttgccgaatcacatttttgtgtgcccaaaatacaatcgatcgtcgtggatttccctgccccgttatgtcctaacaaaccaaagatggtgcccttttcgactgtgaaactaagatcatcaatcactcgtttctccccaaatgttttgcacaatccatgaacctgtatcgctgcttgtttgctcatacattccctcccatctgatctggactcagtttagccgaaaatcaaacaatgatgggatagtggagggaatggaaatttttttctaaacaagtttgcaaattcctaaacatgttcagaacaaagggaaaacacttacatttcaaaagagattctttatactaggttttgaagaaacagtggccacatcgttcttctattcaaaaatagccttcagtgctgcacttagcaaaagctcaaattggttcagtgttgtgccaaagaaaagattcggttggtaatcggagattctttggggagtatatgtttctgtgctaatggtcagtgtggctaggctgccgatttttgaatttttttgaccaacaaaagcaatcacatcgatatggtggtcgttagccattttcgctagctcagctaaccgaactgtatccccagaattagaaataataacgagcagaatgtcttgctgcacttgctgtctaagaaattccagatggctattggcagtcgcacgaaagccatataaattaagagattccgaaaaataattggcgagattctgagagaaaccggagccaaggatcatgatgcgcttgttgcgatactcagagagtaaatcgataaatgccgccttttcctcattggagaaagtgcttggcatcgcaatgtccgattggctgttacctagtgcaaaaaccaactcgctataaccggaatagccaattttcttggccatattgatgattgttgctgtagagacataggttgctttagccacatcacgaatcccgattgtttttaatgactgtcgattttttttcataaaacgcaagacttctgcttctgaatcattcagttggtatttatctataagcatttcaacatccataagatccacctcaaattttatcaattaggagtattatatcatgacagaaacgaaatttattcaagatccctgggcaaaaatgacgacccgcaacggcttacgcggagatgaagttatctcggcattgcaaaaatcgattcgtcgaggcaaagaaaaagaggcgtgtgaatttgcctatgaaatgtatatcacctcaccgcaatttgaagaaaaactgtggagaagattactagcgatcagtgttgaagatgtaggtatgggaaatccaatggctgccattatgatcaataacttaaacacgatgcgcaaggaattccaatacaacgaatccgaccgggcgatgtatttcttccatgcgattcgttacttatgccagtcggaaaaagaccgctcatcagacttactcaaaaatattgtgatcaagagtttcgcgatgggctatgttccagaaattcctgatattgccttggataaacatactgtccgcggacaggaaatgggccgtggttccgaacatttcttacatgaagccagcaaagtaatcccacaagcaaaagtcactaatgactacaaagaacaatacgaaaaaatcatcgagaactatgatccagatcacgttgtgccaagcgcgttttcattcaatccttggcaagtataggaggaagttacatggaaaactctgcatttatcatgaagctgaatgacgtcctaagccccatcgcagcaaaaatcggcaatcagcgccacttaaaagctatatccagcggtatgatgtttggactaccctttattgttatcggttctttttttctaatctttgccaacccacccatcaacatggatcagtaccatcctgaaacagccaatatctttatgacatttatggctggctggaaagatttcgctgtagcaaattatgatctcatcaccgcgccttatcaattgacgatgggcatcattggtttcatcagcgtctttgggattgccttctctcttgcaaatgaatacaaaatcaatccttccatgaatggtatggttgcatccgtcatttttctaatggtttgtacaccagtgaaagaaggcgcgatcagcctcaattttctaggaacaaacggactcttcgtcgcaatcatcatcggcttgttagtggtagaaatcaatcgtttgtttgaagtgaaacagatcaaattgaaactgccagataccgttccacccatggtggcaaccttcatcaatatgctcgttccgctgttgacaaatatcatcatcttctatgggatcaatttgatcttcttagcagcaacaaacaaaatctttcctgaagcagtgatggaagttctgactcctgcaacgaacatcgctggcagtctcggcggtttcttgttgatcgtgaccttgggcaatatcttatggctgtttggcatcaacggctcttcaatcatctttcccatcgtctttacactgggaatggctcaaactggcttgaatgccgagcaaatggcaaatggcgaaaccatgacacacttaatgaacttacaaatgtttcggatttcagtccttggcggagctggtggtactttgggattggttttattgatgatgcgaagcaaagttcccgaatatcgcaccatcggaaaattatccttgattcctggaatctgctccatcaacgaaccagtgatctttggcttaccaatcgtttttaatcccattctagcaatcccatttttggtcactccgatcatttcgttattgctgacctactttgctcagagtcttggatggatcggaattggctttattgttgatccttccttcacaccgttttttgcacaagcttatctttcaagtatggactggcgcaacattctcttttgcctactgttgatcgtcatcagtatcttcatatactatccattctttaaagtaatggagaacaataagacaaaattagtcgatcaaaatctataaccattcttcgtaacaaaaactagaacagctaaatgattttgctttatactaaaaaaaagacaaatcctttcccattcatcgaatcaactcgattcgaatcagaaaaggatttgtcttttttggttaaaactccttcatttaaaagacctgaaaagtcagcacaggtttaggcataatgaaagatttcaaagcggaggccttctggcgtctcaaagaatagtgcataataattaggcgcgatccgttctttgtattccattggtttcccatgaagaatctttactcctagtgctttgatttttggatagatcgcgtctacggcttccctgctttctgctttaaaagcaatgtgttggagggaaccaggctttctagaatcaattgtctcattgatccattcttgctttggcgaacagattccaaaatcaaaggtatcactcaaatactctactacttccatgtcggcatgttcgagatagcctgaatatttcttttgaacatcaaaacctaacaaatggaacaattgatcataaaagggttccgctttttttacatcgttgacagtaatttgaatgtggtggatttgatacatcagtggctctcctttcgttataaaccaaaacagttaacagttctcgatagcaaagggtgggtactgaatcgctcttgtcgccaagtgaatgagtttttcctgattgtcgtcagccgcaattcgattcgtctttagagtaccacaatttcggcaacggtgaatgattgcccattcgccatcctccttggaccaaatactgataggatccatcttccctcgcacaaagaagctcggtctccgggaagagtatccgcatgaagactcgttaaacagtggggacagtggttgcgatgctgactacctgcattttcaggatttaccggtcgaccgcattcttcacagataaaactgtcaagacaattgaaagtaactctaacaatttttaaattgttctatcagtttccttgaaggtggtttacgatcaattttctacatacttagtttatttagtataagaaagtttaaactttacatatatttttcttgtataaggattagttcttcttgtctatgataaaatttattaaaccgtttgaaagtaaaaactattcaaagaaagtgggcgataacaatgggattttggtattttttaacgttagctgtcggtataactttgttgatcataagtgtttcaaataaagaagtatctagatcaaccaaattcgtaatagcctgttttgttttagggatcttgttagtcataggtagtctacttttatttttaccaggcagctcttcgattattgagcaactacttcaactaaattagcttcgttattaaaagccgactttctaaaaaaagaaaatcggtttttatttgtactggtcgaaaaaaatttttctacggctggttttgactttattttagatccagctgaacgatcaacggctccccttcttgcattgcttcatccaacattaaagaataaacatcgtcatcctctttcgtgatacgtaactgttgcgcactcatttcgccagcacccacttcttgaatacgcatcatttggttctctggatccacgctaagtcctccattctttggtttggcgaattagcggtaaaaaaacgtatctggggtttgaagttaggtttcaaaaaaatataagaaaagccccatttaatgaagcgacccccaaaagttagaccaaaaaatctaacttttgggggtcgttatttgtatggcaaaatatccttttgaattaaaactaaaaatcgttaaagaatatcttagtggcgtgggcggatatcggtatcttgccaacaaatacggtatttcaagcaagtctcaagtaagtaattgggtgaatgtctatcgtgaatacggagaggaaggtctattgagaaagcatcaaaatcagaaatattctgttcaatttaagttaaatacgctagagttatatcaaacaagtgagatgtcctatcgagaagttgctagcactttagaaatgaacaaccctgcgcttattgccaattggatgcgtaatttcagagaagcaggtattgaggggctctcaaaagagaaagggcgaccacttactttgactagaaaaaaagaaaacaaaaaagaaaatacaacaactgaagaacgcgatcgtatcaaggcattagaaaagcaagtccgatcccttcaaattgagaatgcctttttaaaagagttgaggaagctgcgaaaacaggaagcccagcaaagacgcaagaatcaatcgcacgaatcatcgccagcctccgaggatcattcaaactagttgagcttcttgaaacattgaaatttcctaaagcaacctatatgtattggcagaaacggtttgacagaccaaacccagaccaagaaattgaagaaaaaatgcttgaaattcgcaaagatcataaagattacggctgtctgcgactaaaaaaagaattagagaatcaagggattcatgtcaataaaaagaagattcaacgtctgataaaaaaactaggtatcgaagtaaagtcttacactcgaaaatctcgacggtacaattcttatcgtgggaaggttggcactgtcgccaaaaatcgtattcatcgtcggttttatacaaatatctgtcaccaaaaaattacaactgataccacagagtttaagtattatgaagtagacaccacaggtgtcgttcgtcagaaaaagctgtatttagatcctttcatggatttctacaatagtgaaattctatcttatcggatttctgaaaaaccaaacgcactagccataatggaaggattagaagaagcaatccagatgacaaatgattgtccatttcgtagaaccttccattcagatcaaggatgggcctatcaaatgaatgcttataagaataaattgaagcagcataaaatcttccagagtatgtctcgtaaagggaattgtttagataactcacctatggaaaacttctttggtttattaaagcaagagatttttcacggagaagtctatcggagtttagatgaattgaaaacaaaaattgaccaatatatctattattacaaccataaacgcatcaaaaagaaattaaattggcgaagtccggttcagtttcgagaagctgtaaaaacagctgtctaacagttaatcttatcatacaaaaaaggagtggatttctccactccataaaagtctaactttttggggtcactacataaggggctttccatttaaggggcttttttatctataaaataaagttcagaaaagtctctatcgtgccactttcatacatgatgtatagtccaagtggaatgaatactaagggcacaatgattcgctcgtatttttcaattgtctcggatattaacggaatagaggatagcacccgactaagctcgcaaaagataattatgccgattgcaaacacaagcaacgccacgagggtctgtgaccaatctaacgaagcaaaataaggtatatagatacctaaattatctccgccagacgcaattgtcagcaatgtaactgtccaaaacagttgatttgccttgctttgttctaatctttcaataatttcttcctcttcttcttcctcaccttctccaacaattgcaaagcgaatccctaaatagatagggattaaaccaagcaatccaaccatccatgcttcaggcacgaaattgacgacataagcagcaactaaactcgcccctacaagtaagcctgtgcctagatattgccccgcataaatatgccatttctgtttattctgtgatagctgtgcaaataaaataatcaatataattaaataatcgatactggtggaaatataaacaccgatagcagatatgattgtctgtcccataaaaaaacctcctgtattagtcagtaatgaatcagcagattttaggggagcacagacacattaatttagctatcgctagtgggtaatatcgaacgtaggaaagcattttactcctcctcaaaacgtagttacaaagtagtttctaactggaattcggtgactacttgtttgactttcgaatataagcctgcatattttgccaattttgtttgattttccaatcgttcaatttgaccgatttcaacgattaattaagtggagtacacctttccaatacctggaacaccgggcaaatattgatattctcgaatgccgacaaataattgcttgattgcttttccaagtctttgatgttcttttcaagcgcacgaatttcacgtacaagaacacttagaacgacattgctggattcttgtgcaagtctacctaaccgataactcatggtaattgcacgttgaatgatttggcaattttttctggatctttaaagtaaccttttccttcttcttgtattaagtcacagaacgcctctaaggcttctttagctatagtcgctgcatccgcaatatttccatagttactgcaattccttttacggtatcttcacccatgacaaccattctaaaaattttcgctaactcgtccattccagctggaaaagaatcccaaaaatcaatatcataattaccattttaggcttctaaaacaaaactacaccaagaaaggatatcaccatggatcattgtactaaaaaattgggttctatgataaatagtgttggtgaccaatactatttgacacagaaccatttaacttaacttgatgcaaataataacttatctaaatcaaatatctcaacatatttttgagtatgctgtttaattaaacctctctcttccaatgatgagaacttacgacttattgtttctggggttgtacccaagtacgaggctagatcttttttcgacattggtaaagtcacataagtatggttttcttcatcttcaacgtattctgatagaaaatcaataatacgagactctacttgctccataccaacttgcatcgtttgcttttctgatacctgtaaacgtttcgtaacatctgatagtattcttctcataatttctgggtaagcgcctaaatagtcatccatatcctttttatgaattctacatatgctcacttctgatattgcttcagcataattagaatggtaactttcagtttgaaaaatagccacttctcccataaaatcaccaggatttaatatgcgtacagtttgttcacgaccagattcatttaagttataaacacgtacacgcccattatttataatataaagtgtgtcatctttatcaccatttccaaataacaacgcattctttgcataatgtacttcttgcgctgattgcgcaattaaactcatttgttcttcatttaggtgattaaaaatcggaactaaacgtatacaatctatatgactatggtggtgatggtgtgccatacaactttcctcctaattaatcgttatctatatagtcatcatcttctaacgcatccttgttaacaaaggcttgaagttgccaaatatttatatctaagtaatctttataactaattagtaaatcttctaatgcatcatctgcttcttcttgtgctaaccgcattgcacgaacggtaaattcacgattagtcctaaaatcttctactaactgtatgaccatttcttcagcagaataatatttttcagacggatcttcagaaattattgtaaattcctgaaattcagtagttgttgaagctggcttaaatcctgaagctagtaaacgttctgcaatcttatcaaaccatgtctcattctcattgtataaattctcaaaaacactatgcaatgaatagaaatttgtgccttttacataccaatgatattgatgtaattttacatgtaaggtatggatattagcaagtatatgatctgtgacagctacagcattaatcttagtatgatgaatgtgttctttatatgctttttcagcagctaatttttcttgtctttcatttgctgttgtcattttatacaccttcctttacttttgaactaataactgaatatcctaggttttcaatagctctttcaattgtactcaaattgacttgttcttcatcaaaatctacttttaccttacttgcattgaacagtatttttacagaatctttttctacaccagctgtctgttttaaaccactttcaattttttgtaaacatgatggacaagttaatgtttctaattttaatgttgctttagtcatatctatcactcctttaaataaattatacaggacatttcttttaagataattgacatagatcaattatcttaattgatatcttcttaatctcattgcatttaaaataactactaaaatacttgcctcatgaactaacatacctatcgacatagacatccattcactaaatattaaactaaccaataatattatcaccacaccaacagcaattagaatattttgtctcatattcgcatatgtccctttagctaaacctaaagcatgggggagacgattaaaattggaattcattagaacaatatctgaactttcaatagccacatctgtcccatttcccatagcaatccctacttctgcagtagctagagaagggctatcgttcacaccatcaccaataaaagcaataatttcaccagtagactgtctttcttttagaaacgcttgcttgtcctcagataacatatcgccatgagcctcggttaatcctagctcctttttaactaaattaactgtgccttgattatcccctgataatacagtgagatttttaacaccaagtgattttaatttttgtaggtcttgtttaacacctgctcgaacttggtcacggattcccattaaaataattaacttacgatcaactgtcgttaatacaatactcttcttttttttcaagaactcaaaaaagcggaaaatcccagatttaaaaatctgagtttccgcttttgtcatttcaaggatggactattgtctcagcctcttctaatttattcttaagatatttttactttctctgcaggtgctgatacttctttttgttcttttcgacctttcaacttatacttcattaatctcatgccattgaaaattaccaccaagatactaccttcatgaaccaacattccgatagacatattcatccattcgctgaagaagacgctggtcaacaagaccaacactactccaattgaaatcacgatattttgcttcatattatttgcggtggcttttactaatcctaatgcgtgaggcaagttgctgaagttcgagttcattaaaacgacatcggatgtttcaatcgctacgtccgttccgcttcccattgcgattccaatgtctgctaaagctaaggacggactatcgttaacgccatctccaacaaaggctacaatttgaccacgttgttgaagttttccgatataagccgatttgtcttccggcaacatgtggccgtgagcttcggtcaaaccaagttcgccggcgaccacatcaacggttccttggttatctcctgaaagaacgactagatttttcacgcccaagtcttttaattcctgcaaattagctttcacacccggacggacttgatcgcgaatgcccatcagtacttttaattcaccgtcgaccgctgtcaaaacgagagagttcccttgttgttcaaaccgtttgacatctttttgcacttttttgctgagagtgacattttctttttccatcaaggccacattcccaacagccactctatgtccagctacacttgaaacgattccgccgcctttcacgacttcagttccttcaacaggataaaaatttgtttctccaatttgatttaagaccgcttttgctaatggatgatctgattcccgttccacactggccagatagccaagcgtttcagcagaatctttttcatacagttcagtcgctgcaacggttgggtttccgacagttaaagtacctgtcttatcaaatacaattgtatccacattgctgaagtcttgaatgacttcactcccttttaaaagaacaccgttacgagcaccattcccgataccggcaacgtttgagacaggcactccgataactaatgcgcctgggcaacctagaaccaagatggtgattgctaactcaatattttgactgaacgcccatacaacaattgccagaaccaagacagctggtgtgtagtatttagaaaagcgatcaatgaaccgttccgcttcggatttagaatcttgtgcttcttccacgagttcaataatttttccaaatgtggtgtcctcaccaactcggtcagctctgatttgaatcgttccgttttctaaaatggttcctgcaaaaacttctgcatcagctagcttgttgaccggaacagcttcccctgtaatgctagcttcattgatatgcccttcgcccgtaaggactgtgccatccactggaactttcgcacccgttttaacgagcaagatatccccttcatctacatcatccacttctacttcttcaaattcgccattatccatttgtttcaaggcgctttcgggtgccatttcagtcaattctttgatagcagatcgcgtttggttcaatgttcgttgttccaagtagtgtccgaataagaataagaacgtgacaatagccgattcttcataattttgaataaaaagcgcaccaatcgctgcaatactgactaagacatcaatactgatgactttgactttcattgcttgaaacgcttgaatggcaattggcgtaatcccaaagacagaggcgatgatcaaagaccactctgaaagtcctacgttttctaaaacaaagtgactgaagaaaccgagtgcgattaacaatccactgatgacggtgataacatttttcttgcttaatatatattgttgcatgctttttccctccaaatttaatttctcttttattgataaacacagtataagataattgcctaagtaattaattgactgacatcaagttttgaaaaaatacgtgtcccttctcactatttttttgatctaacagcctcaatgacacttattcctctttacagttataacgataccctctttttatcgaataaaaatttacggctatcaagtttagaaagttctcttttatcgtttctaagcacctcgaatcggattgcaacaaaaaagcaatcccggaaaaatagcttttcttccagaattgcctagttcatttaatctgttaagcggccttgacttttgctttaaggaccggatagcctacgttttcgatagctttttgaatctcttcaatcgaagtgacagctgaatcaaaattggttttgactttgctggagttgaataatactttaatgctgtctttatcaataccgttaactgatttcaaggcaccttcaattttttgcatacaacttggacaagacaacgtttctaattgcaatatagctttttccataattcctatctcctttatgtgtttttattttatccgcagcagattaatgaacactgccttttcctctttacaactgtagtatagctcacttttagcaaacgaaaattgacgcatatcaagttttgcacttctttttatctttttgctcaattcaccatcttaatagtctttttctgccccttattgccatcagaataataataaattggtggatagtcttgtctgcgtataaaccatactacaatcgcgccaataaacagggccagagacaaggcttgcgaaacgcggatccactcgccaatccataaactgtccgttcgcataccttcaatgaagaaccgacccactgagtaccacaaaacgtaactcaaagcgacttctccttgacgcaaaagctgttttcggttccgtatagtgacgatgaggacaaagcccaacaaactccacaatgactcgtataaaaaagtcggatggtagtaggtaccattgatattcatttgttcaatgataaattcaggtaaataaagattttccaagaattgacgagtaaccggtccaccatgagcttcctgattcataaaattgccccaacgaccaatggactgggctaacaatacattgggcgctaaaatatcaagaacgagtgccaaagaagtaccttttttctttgcataccaatatagcgtaccccctcctgcaatcaatcccccataaatcgcaatgccgccattccaaatcgcaaggatttgtcctggattttgcagataataaccacgttcaaataacacataataaagccgagcgccgaggagtccaatcggaattgcccataaggccatatcgataatggtatcctcttccagtccttttttctttgcttccttggtgctcaactggagagccgctaatatgcccgctgcaataatgactccataccaatgaatcacaacagaaccaatctccaccgcatggggattcaaaacgcctaatacgaattccattctatttgctccatttcttcaatttttcgcgtcattctagtcatggtgatgctgaacaagattccggctaagctccatggaaaccaaacagtaaatacacttttatctccctggtcactcgcttcgtaatacgccacttttccgtgtccgattacgccggctccttttacaacttcctcttctttttccatagctaacctatctgcctcaacaacgttagacgtttttgcttcgccgccaatcgtgttcttggtgaaagggacgacaaagaatgcacccgctgctgacaacgtgatggcaactatcacccaaaaataatgcacattcacccctacttatttttacgttttgttcgacaaccctatcttaaagaaaaataaaacaaaaaaacttgagggttatcatgtttgtgcttttatttttccaatgaatgaaggtcgttctgtcttaaaaaagccaaaaacggacagatggaagcaaaagcactgagttctgtcccgttgttaatgaagagcgacagaacaccaacgtgtagaaaaaagtgtgtccgattattcgctgtaaagcaataaatcatctaaatcctgaatcttgatccttttcccagacagctgttgaatcaatccctcgtcctccaattctccaaatttgcgactgatggtctcaggtgtcgttcctaaataggaagcaatgtcctttttttccatcggcagggtgatggtgggagagttgcccatttcaggttccacattttctgccaaaaacaaaactaaacgggtaatgacactctccaaggctacttgtgtcgtttgacgttctgaactttctaaccgtttagacatttccgccaatagttttaaagaaatagctgggtattgttccagaaaatcttggacatctttttgctgaatcatacagacaacggtatctcgggttgcttcggcatattcctcgtgtactgcatccgggttgaacaaggtccattctccggtgaaatcaccagggttcaagatccgcactagctgctctttgccagagtctgccaatcgataaatacggattttcccacgattgataatatataaagtatcctctttttcttgtgaacgaaacagaaactctcctttttgatactgtttcgtgtgggctttttcagcaatgtaattcatcgcgctatcctctaagtgattgaatattggaaccaagcggatacaggctgcgtggtcgccaatttcatgatgggtatgtttagtcaattcattctccccctttatttattttgtttatattcgctgcttttattatataagtctcttactacaaaaaaattgatgcacatcaagaaaatggaaaaaggactggaaagaattccaatccttaaatcagcttctacttttaccttaatcttcatcctcatcaagagcgtcatcatcttctaatgcttctttaccaatgaacgcttgcagcatccaaatgttcttgtctaagtcatttttaaaagcaatcaatgtatcttctaaagcatcgtcaccctcgtcttgagctaaacgaatcgcgcgaatagttaggtcacgagtgcttctgaagtcctcgataatattttcaaccatgtcttctgctttagcgtatttattaactgcatcttccgaaagcatcgaatatttttcaaattcaaccgttgtcgaagcaggtttatgcccagaagtaattagacgctccgcaagtttgtcgaaccatttttcattttcgttatacaactcttcaaatttttcatgcaacgtaaagaaattggctccttttacataccagtgatattggtgcagtttcacatgtaatgtatgcatgttgcctaaaagatgatccgcaatggccgctgcattaattttcgtatgatgaacatgttccttgtgttcttgttcttcttgcaatctttcttggggtgttctttcttgagtagctttattttcagtcatgatttattcctcctataattttggtttgtttaaaatagctttctttgattcctcctttttctttactgaatttagtataggatagatttccgttaaaaaaattgacgctcatcaagaaaagtatttcttaatagacgccaggcttctctattaaattcaactgaaataatcaaaggaatgaagtcgttccctccaaacaaaaatttcattaaagtagggcctaaaaaaagaatagcaactatactttgtcaagagacctgactgctatttttttgcttgttattcttcaattaccaaatgtcttgccttgcagtatatttaatgctctttctcactagtgttgcatgcaacactagtgagaaagagtattaataagattaacctagaagaataactttactttatttatgtcataccataaataaaaattgaaaaaaattttttatttatttttagtagatcgattaataggagttttagcttgggagcgtcaataattttgtgtaaatgattcttccctactgcagattgtttctaattctcaatcagttggcttagcatttgttcaagttcgccttcggcctgttgaaagcctttatgactgcgacctaggaatttttggttgtaagtatcaaaagacgagactaagaaacgttccatcgactcttcgttttggaactgttccttgcggtggctgtatttcttgatttgcttattaaaggattcaatcaagttcgtagaataaatactcttgcgtatggccaaggggaaatcatagaaagtgagcaagtgatcgttcgaaagaatcgattcaaccacttttggatagctggttttccatttttccgcaaaagcaccacgtgcttccaacgccacctctttagatgaggcttgatacaccattttaaaatcatcacagacttccttacgatcatcgacacgcactttgtgactgatattacgggaaacgtgtacacaacaatgttgaaaacgagctttgggatagaaccgactaatcgctcctaccatcccctttaagccatccgtgatgaacaggaggacatttttcaaaccgcgctcttgaaggtccaataaaatttcctcccaaatcgtgatggattcagtcggtgcaatcgcatagctcaatacttcctttgatccgtccgggcgaatgccaactgcgatatgaatagcttccttggcgacggttttccgctttaacggaatatacgttgcgtccatataaatagcagcataacggtcatgaagctcccgccctttaaacgccgttacctcttctgtaaatgattttgttatattggacatggtttggggcgtgtagtaatgcccatacattttctcaatcaagtctgcgatttccgacatggtaataccttttcggaagaggtgaatgacggtctcctctaacgtgtcattcgtccgtctataagcaggaacagtctgttgcttgaactcaccattgcggtcgcgcggaatctggagatgaagttccccatactcggtcttgaccgtacggtcataggagccgttacgagaattacccgtgttaaaaccaatgcgatcatacttttcgtaatctaggaaagccgttaactccgttttgagaagcgtattgactgctttctccaaatggacacggaataattcattcaaatcgcctttgttcgctagagtctttagaatttctgtagtaaaatcgttcatagggaagtcctctcttctgtgaatgtgttgtggtaactctattctacagaagggacttccttttttctatttacacaaaatattttacactctcctgagttaaactgaatatcattctgtctatataaattttaagatggattaccatacttttgtttgactcattgacaaaaatctaaaaaacttatcctcagcgagattgagtgtcttttaccagacacaaatccctactacagataagttttttatttttttatgcttttaggcttttaggtatatggatatttcagtttttccttactgataagtttctgtccgcaagaattcttcttgctttaatagctcctcgatggaacaatttttttccaatgcttctttgacaaaagcagtggctttttcataaccaatttgcggtgaaagggctgtaatagtccctgtactgttatttacagctttcgaacaagctgtttcattgacggtaatacctgccacacatttatcggcaaaaatttgacacgctttggtcaacagttgacatgattcaaataaattatggaacatcaccggctcaaaagcattcaattccaattctccggaagctgccgcaaaggtgatggcaccgtcatttccaatcacttgaaatgcaatttgactgataacttctggaatgactggattgactttgcccggcatgatcgatgagcctgcttgtcttgctggcaagttgagttcatgaaaaccagttcgcggaccgctggctaagagacgcagatcattggcgcttttgttcaatgtgatggcaatcgtttttaatccacctgaaatcgaggcgaaactgtcggtatgctgtgtactatcaatcaggtcattcgctggccgtaagggtcttggaaaacgtcggttcaattcttgatagaggtattcttgatagcgataggacgcattaagacctgtcccaatggctgtcccacccatatttaaggtcaatagttctgccgataagtggtgcagccgttcacggcaacgcgtcaaactgtgggcatatgcagcgaaactttcccctactgtcattggcaccgcctcttgcagttgggttcgccccatttttgccacgtgctgaaattctttcgctttcatatgccatctgtcaatcaactgtaccagcgcttcatccaattgttcaatatatacaagcaaagccagtttcccagcactaggatagacatcattggtggattggctttgattgacatcgtctaaaggatgaagatattgatattcccctttcttatgccccatcaattctaacccgcgattggcgatcacttcattcacattcatgttggtggatgttcctgctcccccctgaaatgtatcaacaataaattcttcatcccacttgcccatgatgatttcttccgcagcagtcacaatgatttgtgctttttctttggatagcgtgccagattgttgattggctagcgcagctgcggctttgatacgtgctacttgtttgatcatcgtcagatcaactttttgatcagtgaaagcaaaattttcttttgcgcgataactatgaataccataataagccccctcgtatataggtagactgccaattgtatctgattcgatcctcatcatgatttaaacgcccctttttgtattatatgtgataaaatatcacataagagaaaaagacacgagccttttcagccatctctttgttaatccttgaaattgattcctttcactttgaaaaacaaagagaaacagtacaaaaacagaaaagaggaaagtatttggatgaactagataaaaagttgttgaatctgttgcagcaaaatggtcggttatcgatcaaaaagttaagtgaagcgttattcatcactgcacctgctgtttcccaacgaataaaacatttagaagaaaccgagcaattgttgtattatcaagcgacgattgactatgaacaagccggcttgccgatcaaagcatttatccacctatcgatcgaaccacagcaaaaagcaagtttctatcctttcatacaggcgatccccaatgtgttggaatgtgattgtgtcaccggcccttattcaatgttaatcaaagtcgttttcccttctaccaaatcattggacagctttatcaatgacttgcaaaaattcggtcgaaccaacacccaaatcgttttctcgacgccagttccctctcgaggatatcaattctgaaaacccaaaaagcgcgcttatctcacatagacaggcacgctttttttatatacaggggtcactggtcatcgactggcacttgcaaccctcgtggtccgacattcgttgaaaatacaatgtgggttttggtatccccataaaattgcaaatctgtgataaaccgatccaagacgaccgtatcactaaaataaaccttcaagagcatagaataatctccagtgatacagtcacactcgatcacatttgggatgtctgcgatataggcatagaaggcttctttatctttggcattcactgcgcaatggacatacgctttgatcagataaccaagtttttggtagtcgatcagtgcctgataagaacggatatacccaagggtttcaaggttttgtacccgcacagaaacagatggcgatgaaataaagcattgctctgcgatctgtttgacagtgactcgggcattttgctgcatgatgttcagtatcttgcggtctaagttatccataatcatcccccgttctcattattttctcagtttatcgagaaaacaacagaagcgcaagttgcagattacatcctatgttaaatttcctaacatcaacgctgagataattggaaatagcgataaacaatcatcgccccacaagcaaacagaccacacccaaaaaacatcatgtcaaagccaaaaagactggcgatgattccccacaaaaaagccccacctccataagctacatctaaggctgctgaaaataccgctgtcccttgccctcgctgcgcctcagacaccgattctaatacaatcgtattcatcacaggcaataagccggcataaccgacaccataacaactcgcggccagaagcaagctactgagctgtgtcgtaaatggcaacagacaaaaagaaaccaaaatcaataataaactgccataaatcaatgtagccgtttggattttggcgagcaaacgtggaaatacgacccgtgttgtgaccgtcatgatcgacatgaccgtaaaataatagcctgcgccgataatctcacgttcaagggcatattgtgcaataaacgccaccacgccagaattggcaaagcatatcaaaaaaaggataccgctaggaaacacaaccgctttgatgcgaagcagttctcgtaacgatgatttcgcttcgccagagtgcgtattcctccgtgaaaagggctgttctttcaaaaagaaactcaacaaaaaagctgttccgctcaacaagacggccatccgaaaaagtacaggaaatccataattttctacaacagcaagtcctatcaacgggccgatggcactcggcacagcctgggcgatactgaaataccccaatccgactgctaatttgccttcaggaatcgtatcaactgccatcgtcgctgctgctgtcgcttgcaaactattgcccaccccttgcaagatgcgcagacaaaaaagcatcaatagcccctgcagcagattcaataaactaaaatcaatcaacagaatggctaatcccatacaaagcaagactttgcgtccatatcgatccaatgccacaccgattggcaaacggcaaaacaaagcagatagccccaagacacctacaatggcgccggatactgctttagaaccacctaaagaagcaacatataacggcatagtccccatttgggtcgtgatggctgtcattgctagtaccgtgaccaccatcactaagtaaaaatctttcgaccaaagccgactagagctgttcaccttttccatattgtgcctcgcttctatacagctaattgaaaacgtacttgtgtcaaaaattgctgtgtacgttcttcttgcggatcctcaaaaatttcttctggtgttcccgcttctaccaccacaccatccgccatgaatatcactttatccgcgacttcttgtgcaaattgcatttcatgcgtcacgatgatcatcgtttgcccactatcagccagttgcttcatgacatttaggacatcaccgacaagttctggatcgagcgctgaagtgggttcatcaaacagtaataattctggcgtcaaagccatcgctctggcgatacctacacgttgttgctgtccgccagacagttgactaggatacatcatagctttatctgccaaacccactttttctaaggcagataacgctgctttttctgccagtttttttgggaaacgccgtggtgtgcgtagtccttccgccacattttgcaacacattcatgtggctgaacagctcataggattgaaagaccatcgctgttttgcgggcgatctccaatcgttgggttttgccaatatgtgcgagatcatactggaagtcaccgatagaataactccccgcatcaggctgctccaacaaattcaagcaacgcaaaaaggtcgtttttccagagccgctaggaccaatgatgcatacaacttccccacgttcaatttgtaagccaacattttttaagatgacttgtttatcgaaagacttcttcaatcctttgatttctgcttgcagcatactcccaccctttcttttctatcgctcaaagcgcgatcgtattggcagattgtccttctagcaaaatatctcttgcattgttcaaagctgtttctgcaatttcttgtacagccaattgggtataatacgcaatatgcggggtcaaaagcacatttggcagttgattcagctgttgataataaggattttgatcccacccaactgaaaaataccgttcttcattggcgatagcgtctaatacagcaccagacaaacgcccttgcgcgagtgcggcaatcaacgcatccgtatcaacgattcccccacgtgccgtattgaccagacaactgccaggcttcatctgtgcaaaaacagaggccgaaaatagcccttctgatgcttttgtcagcgggatatggatcgacaagacgtccgatgcagcaatcaaggtctcaaaggacacatattcgacaatccccttcaaccgaggattttcactcctactagtggcaatcacatgtccccccatatgataaatcgcttctgcgactagagcaccgattcgaccagtgcctaacaaaccgactgttacgtcttgtagctcccgaccaatcacagaccgtcgatcaagttttcctttgatcattgctggaatattgcgtaaagccatcaagatcgacatcacagtgtaatggcccaccgatgttgggctataagaagggacattggtgaccgtcaactgatgcttttgcgcccagtcaaaacgaacaccgtcgacccccgttgatttgatcgataactgcttcatccctaaaatatgcaagcgttggtacaggcactcatcttgctgcatagccagactaggatacaaacagatgccgtcgtgccctgctgccaaatggatattctcccaagacaagccctccattacgatcgtcactggtgttttgtggataaattgccaccgttcgatataagcaatttcctcttcacttaccccgtaataaatcaatttcattggcaacacctcctaaatgaccccttcatatgctggcggcatagcgtattccaacgcatcacctaataaagcgatcccttgatcgatctgtgccaatgtcggcttcgtaaaattcagccgaaatgaatgctcatagccttttcccgcaacactcatgatattgcctggaatgaccgcaactttcgcctcatcaaggtaatcatagaaccgctctgcgtccatctcagtcgataggaaacaggtgataaaatagccgcctgttggtttgataaaggtaagcttatccgttggcagtgcctgtaatgcttgcagcatgcgggcatatttctcttgatacaacaaggtcaattgggccacatgaccttcgaaatcatgatgatccatatattcggccaataccacttgccaataaaaattggtgtgggaatcggcggattgcttggccaaaatcaatttttccattacaggaccagcagccatcataaaaccaatccggctgctgggtgccaaaatttttgaaaaagatcccgcataaatgattcgtccttcggtatctaatgttttcatcttagggatcggtgtaccttcatacaacaactcaccgtaaggatcgtcttcaaaaatcagcacatcatattgacatgccaatgcataaatggctttacgtttttccaatggcattgatgtgcctaaagggttttggaaagtggggatcagatacaacattttcactcttgcgtctgttttgaggattgtttctaaagcgtcaagatccattgattctgctgcaagatccatcggtaccggcactggtatcgccccatatcctttgatagcattcaccgcaccggaaaatgtttgctcctcgcataacaccacatcgccttcattacaaaagacttttaccgccaaatccatggcttgggtcgagcccgaaaccaccagcacctcctcttcgttatcgatatttgacaattgacgcaaacgttctttgatcaaggtccgtaagcgcggatacccctctgatgccccatactgcaagaaagactctgggtccgcttcgttatataatttttgcgagatctctttcaatgtagccattggaaatgcttctgtcggtggaaatccgtaagcaaaggaaatagctgctgcagactccatatttttttttgcattctctcttaatggagatgcttctaatgtcatgatacgttgtgcgaattgataggccattctatttcctccctacatagttgttagccggccagctgtgtggtaaagcgggctaaaaaggctttggttcgttcttctttggtttcctcgaatacttgttgcggtgtgccttgttcaacaatatgtccattctccatgaaaactactttgtctgctacttcatacgcgaatttcatttcatgggtcaccaataccatggtcgcaccggcttccgcaatttctctgagcagcgccaatgtctgtcccactagttccgggtccaatgccgaggtaggttcatcaaacaagatgaccttaggattcaacgccaacgcacgggcgatcccgatacgctgttgttgtccacctgacagttggctaggataaaaatcttgtcgttcagacaaaccgacttgatccaacaaagcctctgctgttcgcagggcagtttctttgctttgttttttggtcacgatcaatggcatcatgatattttctttggccgttttattttgaaacaaggcataattttggaaaaccatcgctgtttgccgttgatgggtcaatatttcttttttacttgctttgtgcaatgtggtggtggtttctcccaattgaatcacaccttgatctgctcgttccaaaaaattgagacaacgcaagaaggtcgtttttcccgaaccggaaggccccaataagacgactacttcgcctttagcgacatcaagatcaatcccttttaacacttcttgtttgccgaatcgcttatggatatccgttactttcatcataatgcggccctccttagtttgcgcaacagccgattttccagtaattgtgcccctttttcgatgaccaaactaatcagccaataaatgatcgcaacagccacatacgcttctaaaaaccgataattttgctgggccgtgattttagctgccgcaaaaacatcgacaacactgaccatggaagctaaggccgacgctttaaccaacgagatcagcaaattactgaacatgggcaatgaaatcggccaggcttgcgggagcagcacacgacggatgacttgtaagttcgtcatgccgatcgatttggctgcatcgaactgcccttttttgactgccgcaaatgcgcccctgaaaatctcgctgctattgatagcagacattaaactcaaggcggcgatcgctatccaaaccatgttgaaatctttaaaccgcaaagtccaatgcatcgactccgcccaaatatcaaactgtttagcagaaataagatataacgctaaaatcactaaaaccactgggaccccttttaagaccgtgacaatcacttgcagaactggtgcgaggatcttgatcctatacagacgaatcaaggcgatgatcaacccaaccaccgcgccaatgactagtgcggtcaacgccataaaaagcgtcgtaccaatataatgacttgctgttttcagcgcttcgatcataatagacaattgaaaactcatcgccattcctccctattctgggacgtaatccccatctagatatttttctgataattctttgatcgttccatctgctttcaattcctctaatgctgtattgaccgcatcaataaagtcttggtcagcttctttgttgaacaataagtaggcatctgagttgtggactggttcgctgccgatctctagattttcactaaatgaattgttccaattatcgacttgatattctggtgctaacgttgcatcgaccgcacctgaagtgactgcttgtacgatttgctcgttgttgtattccccataaaccaattcaaaagcatcgggattttctgccagataagcctcagccattgctgcttggttagtagcagtcgtcacatagactttttttcctgctaaatcttcgaagctatcgtagaccgtaccggcatctgaatcagagacaatatacgtatcccagaccacatacccaacatccccatagacgaatttttctttccgttcatcattgacttcatattcataggcagccatctggactttattgctttctaaatttgataacgtcgttgggaaatccgctccttcaaaggtaaaggtataatcaagtaatttttcgtcgattgctttaacgacggcgacatcatagccatcatattcaccattttcgtctaaataagcatatggcaatgcttcattcccagtacccaccttgatttctgttgcatcacttgctccactgcttgcagtgtcggcagaactgcttccgcaagcccctaaaaccaaaagtgtcaccaatgtaattgcacctaaaatcgtttttttcatttgaattcctccctttccctctacccaaaattttcctatgttgttttgattttttgctgttttttggtccatgatatcagtggtacttttgctgtttgttgttttgttttcgaaaaactcatccgacgttccagaccggtgaaaacacgttctaagaggaagcttaaggtaataaacaagatcgccgcaccgacatagccttcaagtgtatggaaggtcactgcgcctatcgctcgcgctttgccgacaacatccactaccccaatggtaaaagccagcgatgtgtcttgcagcagtgcaatcgtagttgtaccaaatgcaggtaatgcgacacggacaacttgcggtaaaatcacttgtcgatacatttgtgttttcgtcaatccgcaagcaatactcgcttccttctgtgtgaccggtacacttagaatcgcagcccggaaagtttcagactgaaaggcagcagtatttaatccgtaggtgatatagatgaaaataattttattccatgaggaaacatcgatttgaatcatttgtaataaggcgggtacaccataatacacaacatacagttgaaccaatatcggtgtgcctcgaataaatgaaacgaagactgccgccagttgactcagaaatggcactttttcgacacgaataaatgcaagtaaaatccctaaaagcaatcctgtaatcgacgccactgctactatcatcaacgtaaccggcaaagcacttaaaacctttggaaaatattcccaaactaatttccactgaaaaaattccgacatattgcccctcctttttctgaatattctgattattagacaatattactaatggaaaaaaatttttcaatagattcattactaaaacttcattaattttataaattctcccttttaactaaaaaaagaaagatgcaaacggtatctttctttttaatataagaatataaaatactacccgtggtgctagttaattttttcctagaggaaaatgtctaaacatgttggtaaatcaacaaaaaaacgcatatagtagtctcaaaactcccaagaaatgaggactatttaacaaactacgatggttacgtcgtgacaactgaacattttgacttagccaatcctgttactaaagtcgatgatatccccgattatgaaatgtacagtcaaacaatcgatagcttaaataagcgttttggcaatcgtgttttaaaaggcatcgaaatcggttacatcgcttctgaaaaggatcggatcatcgactatttagccgataaagattacgatttaaaattactcagtgtgcatcataatggtcaatttgattatttagatgacgaagtcaaagatatggatcctgctattgtgattcctcagtattttgcacaactttcagaagcactagttgttatagaagcagatgtctttgctcattttgactatggttttcgggtatttggtctatccgttgctgaatttaaacaatatgaagcgcagtttttaccgattctagatcaagtaatcaaaaataaattggcattcgaattaaatgctaagagcgcttacttgtatgacaatttagcgttatatgaatatgtcatcgatttatatctttcacgtggtggtaccttgtttagtgttggatcagatgggcattaccttgaacatttccgtttccatttcgatgatctttttgctctgttaaaagcaaaagatgtgacggaaatagcgatttatcaaaaaggaaagcgaattatggttccattaccagtctaaaaaaacgtcctcagcatcaaaagtgaggacgtttttttagatttctttttctaaaatcggacaaatacgatcttgttttcctaaaggaaaatgtttgatcccgatttttttaaatccatgacgttcataaaaacgaatacctgcatgatttttttcataaacagtcaaacgtaaataacgtttttgtttcgttttagcataacgattcgcttcatcgagtaaccgttgccctaaccctttgttttgataatctttgagcagatagagccgttgaatctctatagcatctttttcatcattgactttcatataaccaatgagtatttgatgatccttaataccaataaatttactggttgactgtgccaattctactgccaatatttcagttgtcaattgtgtctgtaaatatccttgcatatcaagtggatctgcgccatcgataaacgattcataaaaactgacaacacttacaacttgtaaagcatctagatcatcataatctaaatacgctagtgtgatttgattgttcatctaactcctccttttgacatagtatactataaatcacccgtggtgctagttaattttaatatcctaaagaatatctcaaagttccttcaaaacgtcgttgtgctcgacttaatagaacactgtaagccagtaatatgctttcaaatctactctctagccctttaacagaacgtgagttgaaattttgacaacctaatttttctaaggaagaaaaaacagtctcaactgtttttctttgttttccaagtaagctgtggtctagtttttcagatttatccatgtttttacgtggcggaacggatatagtaatgcccttaagggcaagcttttcatggattttatggctaatatatcctttgtcccctaggatattgggaagattcgcttcttccgataaagtctctaacactttcacgtcatggacacctggattcgtgatttagtaagtaatcggaaagccagtcttagtaacgatcatatgaattttaagaccataaaaataagatttttttgttgagttatagccaactttggctatttgattcaatagttttgcttgtctatttctaactggtttacataataaactaggaaaactatctataattccgactagttcacctttggtgagcttcttgatgaaaaagtatcgaataatcttgatagtgtaagctaagtttgaacttaagcgagtgaatcgactcctactaggaaagtcaccattaggaaataagacggaacaaaccgctctatacgtggctctttggttagtatagccattaattatgccccatataacacaagcaataatcactgtatcgcgttgcttcagttgatcagtatttcttcggtttttaatcttatctggtacacaattgtggtatatgttagaaacagttctcataatttccttgaatgttataaaagtatctgtataatgttcagtatattttgatgaacgcatatgtagtcctcatttcttgggagttttgagactactatatgcgtttttttgttgatttaccaacatgtttagacattttcctctaggaaaaaattaactagcaccacgggtttaataagttttgtaataattactcgacacggtagttcgttagctacgcagccactgatcgttgcatagtttctgacattgttcttatgattcagtaactcttattccgtttgactcctaatagttcatgggcgaagcgcgtccgtctaaaatagttgtttctatcgtttgaacctcattgacaatttttggagaatcttaccattccttttcagcagttaaatgtaaaattctttaatagctacgcttatttttcatccagaatgataacctcccaaatttttccttctatctatatagcatcattttgtgtttcacgtaattgaactagttgagcaaaatcaattaaagattcaatcgacaatccagcatttcgcaagttttttgctagataaatccaatttaaatcattggtagtataatctcggtagccgctctcgtggcggtgaacgggtggtatcacgccaacacgctcataatagcttagtgtatccacacttaaatcaaacatttcagctgcttttttatattcatcgaatctcctcctcattcttcttatttataataaaccatggagttaactctagagaaaccagaagcctcttgtctctatgctaatactatactaaatacctcctcacattccgtagactattaaaatattaagcaatagataaaatcagttaaatgcaacttctcatattctaatgtttattaagtaagaataatgttaaaataaaaaaacgaagagtattcggcgcagtccagaaaaacttccccaagttttctgtgccggtactcttcttagattaatgcatgttgcttaatcagcctacgctatatatttcttttttgcaagtaattacgatgtagaagcaatgcttaggaatcccttacgttttttctatttttacttttgacttcttttaagtgctatactggataagtaccatgaaagtaggtgttcaaatatgaatactaatttttatccagtggaagtttttagttcggactaccgtttatattcatcaaaagcaaaaacaaatttgtatgattttcaatcgagaccacctttgatcacgtcatttgctgtgctaaatttgaaagagttgcacaatattcaactcaaattatttatttacgatattgatatcgaaaaattttctactttagaggaagctaagggagtgtcaataattttgtgtaaatgattcttccctactgtagattgtttctaattctccatcggttgactcagcatttgttcgagctcgccttcggcctgttggaaacctttatgactgcgacctaggaatttttggttgtgagtatcaaaagacgagactaagaaacgttccatcgactcttcattttggaactgttccttgcggtggctgtatttcttgatttgcttattaaaggattcaattaatccagttgctgcactatataaaaaatttcatcatagtttcgccctagtcgttccaaagattcgatgacaaaaatatccttcttccttaaaaaatgaagttctttttgtaattattctcgtgaggtcttcttttaactacataaaattgtaaccactggttttaagagtagtgtatcatcccaaatcatataattaattgactgcgattgttataaaactcacggtaagccatataactagcaataaacgaagaaatcgcagtaactgaaatcaacataaacatcacaacaatttggtaacgaatcgcttgaacaggatcaattcccgcaaaaatcaaccctgacatcatacctggtaggctgacaagtccaaccgtttttgttcggtcaatagaaggagccatacccgttttgacgctttctcttacaatactcatggacgcttgttttttattggctcccaatgccaatttttccaatacctgttggcgttggtccgtaaattttgaattcaaagaccgataggtcactccaatcgcagtcatggcgttgctggcaatcatgcctgtaattggaacgatttgggaaggggaccagtcaatgactcctgaaaaaacaagaatgagtaaggacaaggctgttcctactccaatagccgtcgttgaaattttaaaagagcggttgatcccctcactgcgtgtatgggcgttataagaagcgttgaacacaatgaacaaaaccatcgctaaagtgagaaagttgttatccactcgtaatacgtagctcaatacatatccaataaggaataattgaacgacagcgcgaattcccgcaataaaaatgtcgtttcctaatcccaatttctctttgtaatcaatcaacaaggcaactatcaagaggacagaggataaaagcaaagaaagattactgatttccaaattgtttgtcatttcgattcctccatttttccacctttgatagtaatcagacgagaagcttggtcgatttcttcctggttgtgagtgacggccaacaccgtagtttgttggtctttcatcatgtctcggactaaatcaaggacaatcgctctgttttcttggtccaatgaactggtaacttcatccaggagcaacactttcggttgatacatcaaatttcggaccaatgcaacccgttgtttttcccctcctgatagttccttgacctctttcgataagtaagtttcaggtatttgaactcgttctaataatttttttgcacgttcccgatcaaatccttcttctcttatgcgggcaggaaaagacaagttctcttgaactgtctcatcgaatagagaagcgttttgaaagaaataagagacttcttttctatactccacaggatcgattttttgcagatccgtacctcgataataaatttttccggaagttggggaaagcagcgtactaattaatttcaaaagggtactttttccacttccagaaggaccagaaaaaacaatcacttcccctttgtttactgtaaaagagatatcttgaaggatttggtttccgtttgcctgaaaaccaaccttctctaattgaaacaatgaatcactcataccacttctctcctttataaaaaagccctgcaccggtggaccatccatacgggtgcagggcttttgtttcatcctagtgtacctcagtgttcgtttggatcgtttttggcgtcttcatgagtagggtgaaccgttccttcaaggtgatctggaccagcataaatggtatacagtctgagcggcttatcaccggtgttttcgatgttgtgccacatgtccgccggaacaaatacggcgtcatcatccatcactttttgttgaacatgtaagttatctttagaaggccccattttacacacgccttctccttcttcaatacggataaattggtcaatgccttcgtgcacttccaaaccgatgtcatcgcccggttgaatggacattacggtgacttgcagtttactgcctgtccaaatggtcgtccggtaattatcatttcctgtggtggcgtcttcaatattaatgatttacggcttcttcccatgatccttgtagtctatttccatcttccattcctcctagtctttgtactgaaacaatgatacctacttcttatttataataattctaattaatggtaccacatctaaaattctatgcaaaaaaattggctttttggagagcgattctaaacaaagaccatataacgcgcaattacaattggtaccccttaatcctcagcacataaaggaaaaaatatggaatcaaaaaataaccgatatgtactctggttatgacttgaatcagggagaatttcagagacgacacatcatacttttttagtttacacttgtaaactaactagcgtacattaagtttatgctcactatcaagcgttgtcaatcctttagactcttatcaatttcgaaagaaagtagcaaggttattgattgtgactgtaaaagtggggtgttcctataagcacattaaactatcttctctaatttatcatgctatttaaattctgttttttcatgagaatttttgtccaaaacttgttaaaatgattttaaaaaatacttacatacacaatccccaaaagacactaatgtcatttcagtcaaaaaagataccgcagaaaatttccacctgagattcaatacgatattactctcttgacagccagcttaattccttagttgaatagattattaaagtgcacaaaaaaacaatgcggcgtttgttatattttctggtataagcgacggtgctataaacttttttgcagattaaaaatcatatgaatttaactccagtaataagagattaagtgccaatgcataaatggaggcatgtccagcactatgcgaatgctaaaacatcaatagtacaggaaatcatgaaaagagcgaatagtaataatgcttaaggagagtgtcatgttttcttggtttgttataggaggttatatcaatgaaaaatacagtagataatttgtcgaaaagtaaagttattttaatgtgcggccctgcgggagcaggtaaatcaacactagcaaaaaaatttgaaagtaccgggatgacaatactatcttatgatgaagaatcattcaaacgaggtttgaatgaacatcctttacctcaggaggttttagaagatattaaaacctatcttgatgaaaaactaatttcacttatcatgcaaaacattgatattgttctcgattattcattttggtctagagaaatgagaaatgaatatatttcattattaaagaaatacgacatagaacccaaaatctattatataaagacacctaaggaagttgttatggaacgtattcgaaaaagaaacggaaatcatcaaaatgatatcatattgacggagcaaacagcttccacttattatgatcattttcaacccccaactgatgaagaaggtgaagttatagtagtcgagggatattaatattgtggttttaggcatggaaattgtactagatgataagttttgtcaaattttttgaaagatatacttccaacaaggggataccagcttcaggtgatatcattattgtcatctcagagcaaggggtagtattgattcagccggaagaataagtggcgatgcaatgaagacgatgaatgcattattgaaattacaggaaaaaaacttactgaaatacgttatgtttattcttttgacaactctactcaatcatgattatgcaattagacacgttattttttatcatgaatggaaagggggtgctattcatggaacaaattatctcgttagttatcgcaccacttttagtgggtctaataatcacattagttgatcattggttagatgattagacgatagcaagcaagttgctgtctaactcacacgcttgtattcgcaacaagtgcaaagaaaagcccgacctactcgcaataggttgggcttttgtgctattcattagaacttatctcgtttcgcacattcattatagcatgattttaaaatgaagccaagttgctgattctatctgttgttattggtgttgcctagaacgattctaagcacatgtttaattttaaagtgggcaattttatctttaaaatgtcctacaatgattcaataaaagcatggctgctagtgaaacttgcgaccatgcttttaaatttacttaaattctctttttaaaaatgattcctgatcctaataccattaatgaacctaggacagacaatgcaatatttgctgtttcacctgtttttggtaaaactttcatttttccgtctaaacctttaactgtaactgttccgtctttttgaacgtctgctccaatttctttagcttcaactttttttgttgttcctatattcaaaaatcatttgacgattaattattttttaggtagcgtatgtttcaataaaccaattgagtctatcgttaataagctaaataatcagcctatagaatagcaagaatggaaaaactaacatgaaaaattttacgaagagtcaatttttttgactcatctaaaataatttacatattatctccaccaaaaaacatagctattaccggcataacgataaggaagattggaattaagcaaattcctgtaagccaaaacttctttgattttttataaattccataaataattatggctaagggtataaaccaaactgcaaaaaaataaattgtgtatgagagcataagtctcttcctccttttaaacaaaggtatcatgacaaaaaatttaactctataagaatttcaattctttaaacctttttaataaaaaatagtgtttaaaaaaaatacttattagatactttatctcatttttataatttttacaaacactcttaatattgaacttaattagacaattctagtagaaaagtatctttcatgcagcactattcaaacaattttcgcaacttctttttttatcttcatttcttcattgtgtaaagggccacgataaaatgtaggaaaagggccatcgaaaatgtaggttagatttaaaatctgatattctttttcatgaaaccattcaaggagagtgactcatgcgagaagatgtcttagaaggagtcttacgacacattatgaacgatattcaacctaactatgcagccatggtcaagcaatataattgtgattaccgaacagtcaagcgttactatgaagctggaactaaatgggaagtagaacagatcaaaaagagacaatcttctgctcctcttttattaagcggttttgaagaaattattaaagataaaatggagttaagctgttccgcttcttcaatttattattttattaagaaaaaaggatatcaaggtggctataccaccgtcaaacgatattgtcggaactatcgagaaaagcgtgtaaaaaaagcaaccattcgaattgaaacgacgccaggtctttctgctcaagtcgattggaaagaaaatattaagatggtgagtaaacatggtgaagtcttttacttcaatctttttctatatattctaggctattctcgcatgaaaaacttagaggtaacctttgatcgaacccaagcgaatgtcttcaattgtttggtcaatgcgtttgagtactgcgggaatggtgttcctcaagaaatttggtttgacaatatgaaaacagttgttgatagaagtaaaagccaatttagtcaaaccgtttttaccgaaaatttcgtcaatttgctaaagatgctggattcaatccgattgcttgtcgcccttttcgtccacaaaccaaaggcaaagttgaagctttagctcgtactgttaaccgcttaatggtctttaactacgagtttgaaaatgagcaggagctaaaacgaatcgtctatgagtttatgaatgacttaaataatgaacgttctcaagcagtgaataatcatccctctaagcttcttatagatgaacaatcggtgttgcgtcctttcaattgtttagaattagtcagatatgtttctagaacccaacacgtaattagaaaagtttccattgaatccatggtccaatatcaaaactcaaagtattctgttcccgtgaaatatattggtaaagaggtaactttagatgtccgtaaggacagtctattcatttggtatggccatcaatgtattcgctcgcacccattaagcaaaaaaaccttaaattatcaacgtgatgactctcttgagattcttcgatctgatgtcttcaaatacttagaagacgaagagttggagcgctttgtagaagaaaatttagatgcttacgatgaattataaggaggctcatatgtcaaattaccatcagttattaaatcaattatcagatttaaatcttacctgtatcaaagaaattttacctgcccatttagatgaagtagctaaaaatgaacaatctctagttgattctttatttgaattaacacatcaagaaattagctatcgtagaaaggagacccaaagaaaaattttaaaacgggcaatgtttccctatcataaacgccttcatgattttaactttgattttcaacccaaaatcaaaaaaagtgaaattcaagatttagtgacattacgctttttagacacgtatgacaaccttttattcattggaaatagcggtgttggaaaaacccatttagccgtttcaattggtttagagtgtattgatagagggcagagctgtttatttatcactagtacagaactggttaatcgacttatccgggcacataaacgtgggacaagtgatacatgctcaaaaaatatgcgagctattctgtattaattattgatgaagtcgggtatctccccttctcaaaagaaggatctaacttactgtttcaactaattaatatgcgatacgaaagaaaatcaacgattattacaacgaatattcctctgtctcaatggtccgaaatttttggtaataagaaattgactaatgctttattggaccgattggtccatcattctaaaattattcaaattacaggaccttcctatcgaatgaaaagttatagtgaaacgaaaggaaaagaaacgaaacgataaagagaaaactacctacaatttcaatggcccaaaaccaacattttattatggcccttgacaactggcaaaccatacaacttttaaacaactggcaacaacgtcaaaaaaaggagctttctatactaggtttaagccatcagagtaataagcaactagtcttccccaatcgttcaaataacttttgtcgtcctagtcaaccaaatgattggtatgatatgatcgctaataaatataaacttgaaaaacggataactcttcatgaatttagaaaaactcacgtttccttgtggcaatggcagatatgaaactagaggatattatgtatcgtgttggacatagagattcaaaaatgacaaaacaagtctacaactatttttatccagaacgagaagaacgaagtgctgataaatttgctcaatttattgagcaagaaaaagatttgttttaatcattttcataaattttggatacaaaataggctagtatcactgaacaaagtaatactagcctatttgtctcatcaaatttctaccaactcaacgagaacaaactaccaaaatggtatgcttacctatttttcttttgatgcactaacttattgcttgtagtaaactagttaaaacaaaaaacatttcaaggagtgatttaatgtcccaattgaatcaaacatacgaaaattatttacaacaaccagaagcgttatcttttactgaaatgaccactatctatcaagaaatattgaaaaatgctgatatgaatgataatgattttatcgaaatttgggaagagttgatgggtgctgctattcgttatacagtcattcgtgcagaatggcctcaattttctaaggaacaaaaactggaaaaagattccgaacgaacgaatattcacaataccattatcgaccatttcatcctattggaacgcatctttcaattaaaccattgggacagtcattcttggacatcacgcttattcttacaagaagaacaagaacaacgtacaagaagtgatgtgaatgaccaccgacaacggattggcgatttcgcgaattatttggtgtttgtttcagcggttaatggacgatagatatgaaagtcacgatttgataaattctcatcatagtagattatcaatatttttttctaacgtctactatgatgggagcatatcatttgattatcagttcttatacattttctttaatagctttttacgtctgttttttatttgttccatcattaaattctccgtcagaggagatatttgatcaaatttcttttgacatcttctagcataggaaatgaagtttccaaatttactccctttactatcccttacacccacatcaaaaaaatatctataaatatgccttttaccaattagataactcgagttctcaaattcccctacatcaactaagcttggctcacctagggctttgcttgcaaatgtaagttcaacaggtgtctcatctaacacatatcctctaggcgcttttgtctcaataaattgataatctcctggtgccagattttttaccaatacaacccccttatcatccgatacaagattttgtataaccgtttttccttctttatcgatgagcttgaattttgcgccaggcaatgggttttctttactatctgttttcaccaattgtgctgattcttgataattcacaaaaccttcacttgcaatacctacttcaggttgtccctctgttgagtcatttatagtgaaatctttaaccgatagataattggctacttttgactagtgccatgattgacatggtattggaaagatattcaacatatactaacaaaaacagaaaacgattatttaactgaatttctgattacaatttcatgttttacaatcttagattctacgtttccgcctttttcaacaagttgaatcaacatgtcaattgcctcactccccatttcatgaaaaggttgagatactgttgttaaagctggtgtactcattcttgctgttaatgaattatcatagccgatcactgacaattcctcaggaattttaatcccagcttcagaacaagctgacatgacacccaatgctgtttcatcactggcactaacaattccatcatagcaaacacccgattgaataatttcctccatattcttctttccagaatcaaaaccataatctccaaaataaatatctgtatcagaataaatcaattgatgatggatcaacgtttttttaaatccttttatccgtgccttccctgcgatacgatcagatggatttacaccaatcagagctagtttttgacttccacgcttgattaaatatgaagtagcatcggcaatcgcctgttcatcattgactttaacaaacggaatatcccccttcaccgtatctgcagaaagcaacacacaaggaatattgtgttttttaattaaatggatctcatcatttgataaatctacagaaaaaatgataaacccgtcaacatttctctccttcataagcgtgatgctttctttcatcctagacccatctacgcctgcatgagtcaaaataacgttatagcctctttgataggcttcatcttcaatcccgctaataatatcaccataaaaagtagtagcatactgcggcataataatacctaacaaatttgactttctactcaccaatgatacagcagatttattctgactatagcccaactcatgagtaatagctaaaattttttgttttgtttcctcgctgtatccaccaagaccattaataactcgtgaaactgtagctatcgagacattcgctctcttggcaatgtctttaattgtatattgcatagaaacctcctgagtaaacgcttacgttgttagctctagtattacacaaatatgagggaaatgcgagaggttttagtataaaaaaagaacctcgcgccttcattagtgaaataaatgaagcacacgggttcacaataaattttcttgttcaacgtttgaacatgcgccttctgcgggttgatcttctgtcgttcatcctttttgcttaaagtaaagcatgtcccaatactctaacgagggaacagtgatcgtaacgaaatttccttgcgcatcatgtccatattccatatccagttctttagaaacggaattatatctcggatctggggaagtgagccaagcactttcaaatgtgtcattcgtataatatttcactgtcaaatcttcaacaatagtaggtgtttctttctctccttgatttgctcgccaatcattatcagaaacgccaagtaaattgatcatttgaatcgtatcgaatccattaccagacttactatatgcccagattgtattaggctgtccatcgctcgattgattttgatcgacaaattcaatctgatgcccattatcttctaatccatcccgcaaaagattttgataagcaacaataaaattttgcagcgctttttgacgtactttgtgttcatctgacatatataaattatgcttgggaaaatattcattcgatagcatttcgtcgccatcacctaattcaatacgtgaacctcctgcagcatatactgccgcatctgttaataaaactgcagacatattaaaaggttcactcaccacactctcagcataatcgtattccatatatgctggaatgatcagagatttcccatcactttggtctcgagaattatcgatgacgttctttagactttgataagtattgtactgctctccatcacttgttgtatcccaaggccagatttctgcatataggacatccacagcagaggcatttacctgttcgataccttgagcacctacaggattaaatgatagataatagctatcaagcttctctttggcaatatccaagaattctttatacccatccttcacataaataccttgtgtctcatcaccaatcatatcatgagtccacatttttccccattcacccactgtatctccatgccaaccatcaaatcccatcacttgtagagcttctaaatttttttgaataatatagttttgccattctggattttgaatatcaaagaaaaagagattggattgacctgtaggacttgcacccattgagaatgtaaatcgatcacctttatttttaccagcttcatgatcttctgcataccacagcccccactcttctttgataccatattgagcataattatttgtcgcagcataaatcatattataggacatatttgtcatccctcttgcttttgcttcagctatgtagcttttgatggtctctccactaatcttgcgaccagcccaatcttgccactccattgttccatcttcaggaattaattgatgatgcaggtatttccaatcatagtattcaatcccatttaattgccagtcgttcatttgctcaatcactgcttcagtgtctatatccttatcgaaatttgtcaaaaagccatatctaggaaacttcgtccatgtgcttgacacatctgctgctgtattcatgtgtcgaatagcgtgaccctctgaatcgagtatgtccaattcaaataaatagcctttaaagtcttcgtttggtgcagtccattcaatttcctcttgaatgctcccttctgatgtcgtttcccaaacgccttcaatcgtatcgattgtttcgttcaagtatttcacgttgacaagatacttgcctttagatgtttctagagaatttgaacttgtcgataacgccaagatgatggtttccccgggatcatacatagatttatctactgaaaactttaatgttgcatcatattgaatgcccaccatctcctcttgcaattttttgttcatataagcactaccaaaaataaaaacgaaaagaaaggcaatgataataatcgaaacagtccagcttttttgtgtatctttttttgttgcaagaacttttctattatttttttctcttattttcgtcatatttactccttttctaaatatttcagtcactaagtaaatcagcttatttctaagacaacagcttcataggggtccaaatagagcataccttttgtatattctttcttcgtataattctgaatcaaaactgattttggctcttcctttagatcaaaagtagttgtcttttcttgaaaattagtaatgatcaaccatttttgctcatctagcacacggcaataagcaaaaatattttcgtcttcggtatcaaccaaattataagttccccaaactacaattggatgttcatgtcgcaattggattaattttttatatgtgtagaaaagggaatctttttcctcaagagctttctccacattgatttcaggataattaggatttatatgtagccaaggtttattcgaggtaaatcctgcattttttgaatcattccactgcatcggtgtccttgcgttatctctcccttttgcattgatcgagtccaaaatatcctcttttgcatagccctgcgacaagcggacattgtacatattgatactctcaatgtcatcgacttcttcaatggtttcaaccggataattgatcataccgatttcttctccctgataaatatacggggttccctttaataaatgcagcaaaattgcaaacatttttccactttggacgcgaaactctttatcattcccccagcgagaaatgattcttggtaaatcatggttattccaaaataaactattccatccctcggaagccagctctgtttgccacttggaaaaaacgtcctttagtgctggaatagacaggtcgattaaatcccacttttcttttcctggttgctgatcaagaccggaatgctcaaattggaaaaccattgacagttcattacgattgggtttggaatataatttagcaatttctggtgttgctccccaagtctctccaaccgtcataagatctttgttgccaaatgtagctcgattcatttcttgcaagtattcatgcagtttaggcccattccctgttatctttttgaatggttgtttaccaactaaatcaataacgtccattcggaatccgccaatccctttttcaatccaaaaattcatcatgtcataaacagactgtcttacttcttgattctcccagtttaaatccggctgttttttactgaataagtgtaaataatactgtcccgttaattcactatattcccaagctggaccagaaaatgttgaacctaaatcattgggcggattcccttgtgaatcaggatctgaccaaatgtaaaaatctctatattgattgtctcttgactgtcttgcctcaacaaaccagggatgttcatcactggtatgattaacaaccaagtccataacgattcggatattccgcttcatagcttctgcaatcagaatttccatgtcttccattgttccgaattcgtccattatctcttgataatctgaaatgtcataaccattatcatcatttggcgatttatagacaggacttaaccatatcgcatcaatgcctaaatacgccaagtaatccaatcgttggataatcccttttaaatcacctatgccatccccgttactatcttgaaaactacgaggatacacctgatatacgactgctttttgccaccatgaactcatattgaatctccttttacatttcatactttttaaatacacttaacattaaaaatgattttaagaatacaagaaaactacacccaataaaaatgctcagatacaacacaaaaacaaatgcaattggggaggtcactatcaaaaatagcaagaacaatgtgataactgataacaaaaagctcacccgcatatttgctaagacaagcctcatagagttcatgaaaacaagcttagccgaatctttaaagcgtgcaatataaccatacgtatattgactacttaacacaaggacaagacccacgatagataccccaagcaagccaatgagattttgctgatccaaatggatcatataattcaaatcgacaaccacaacgaaaaaaacaatagattgcatgatagtaaaaccaatagcttgtttgaaatttcgtttatatgccaaaataaagttttcaataacacgtgtatcattgttttcatgcaacttaaagcaaacggcataagctgcgctggttgcaacaccaattgttacaattgggatactccctattaaaatacataaattgagaacgaacagactccacaacttcatcaaaaggttatagacgggtccatctattcgaaaaaaagaattcataggtttacttcccttcttcttaggttcttatcgaatccattgacttgtttttcaattatctcatgattagaattattcttttacagccccaacaacaattccctgtacaaaatatttctgtaaaaaaggataaatcactaacaaggggacaatcgctacaatgattttcgctgcattcagattacgatctgaaacagctaataaactttgtaattgttctgatgtcatgccgcttgcattttgcaaagtttctgcaatattgacagacagagattgaatgtacgtcattaatgggtaattttcaatttttgtcatataaatcaaaccaccaaagaaatcattccagctcccgacaatactaaataatgatacagttgccaaagaaggtaaagatatgggaatgtatatcttacgcagaacatcaaatgcatttgctccgtctaataatgcagactcttccaaagatttaggtacccctcgaaaaaaattcatgactaaaatgacactgccaataggcacagcacccggtaatattaacgcccagatactattgatcattcccagattacgcacaatcaagtaggtcggtatcatcccgccattaaagagcatcgcaaaaaccataaatcccataaagaaacgtctagtccgaaacactttttttgattttgataatgggtaagctaaggtgacgatcatcactaaattaaggaccaaagcaacaaatacacgaaaaacagagatcccaaacgaacgccaaaactgtgtatcgttaatgattctttcatatgctgcccacgtgagatctactggccaaagtcctactttattccctgcagctgcttgggaggaacttagggacagcgccagaacgtttaataaagggaccaaacaagatagtgttaataaaataacgattaaataaatcacaaattgtcgaataccgaatttctctctcatttttttctcctctctatgaattaaaacataacccgatttgtggctttttcagctgttttattcgagacataaatcaaaatcaaaccgataatcgaccggacaagtcctactgcagcccctaaactataatcacgtccgattaacccaattctataaatgtaagtatccaaaacatctccactagcatagactggtggtgaatataagttgtaaacttgatcaaatccggcacttaagatacctggtaaagccaagatggtcatcaaaataataaaagacatcatgcctggaatcgtcacatgttttacacgttgcaaccaactagcgccatccattgttgcagcctcatataaccctggatcaatcgatgtgattgccgctaagaaaataatagagttataaccaaatcctttccatacatctgtccaaatcaacaaatgtggaaacacagcattgctgcccaaaaagttaattcggtccaagcctaagctttgtaacacttgattcacagtaccatctaaattaaatagattgagaataactgatgccaagatgacccatgataagaagtgtggcaaataaacgattgtttgcatggttttcttcatccatttgacgcgaatctcattcaataaaatggcaaagataatcggaataatggtgttcaacacaattttccctactgcgataaaaaccgtattgtaggttacttgccagatatcaggcaaattaaaaatatagataaaattatctagtccaacaaaatccgaacccaaaaagccacgcgctggaacaaaatcttgaaatgccataattaaaccaaacattggcgcataagagaagattagtagaaaaatcattcccggcgcaatcattgctagaaataaccactgatctttagaaaaccacttcttttttgttgcaagcttttccataaactttctccttatttgataattgataatatagtagagcatttgcagcaatgaacaaatgctctacccaaaatttagaaatgacctttattcatccgcgagcttttgcatttcttctaaaatcgcttgtccaccctgactattccaagtcttcacatatgaatcaaaattatccaaagattcttcccctgtcacaaatttgataaacgtctcttcttctaattttgaaatttgggcaccattccgctcacttgctttaatggtttcaaatgtcgtaaatggcgtgatttcattatagatattctcttcccgtacaccgttcatcacattagttacagccaataatctcgacgcatagaccgcccaatctgttggatctgcagtgctcgggtcatcaagataggttttaattttttgtgcattgttttttactgtgaaacttgaaatatcatcaatatctatctcaccttcagccgcttgagaagcttccactgcatcagatatttcacttaagttttcgaacatttcaatattcattggacgtactgatccgtctacagatttttgcgcataggcatatatttcaggatactctgtttccatatcggttgagtttggtacttcatcaaacaataaattgattatttttatggctaattctgggtttgcaaaatttttattaacaactacatagccacctacacctggtttgctcacaccatttacttgaccatcactactctcaattgcataaggcgtgaatgctgcatcagggtttgcagtttttgcttgaaccaaagcccaatcagataagtgccaagggccaggtataataccaagttctccattaatcatcatcgcattgatgtcgtcgtatgttcgcgtaccaaattgatcatctaaaattccatcgtcaaatagttgttttacgtagctcaatccttctttggttttggcagtatttgacccgtaaaccaactgaccatcttccccaactaaataatttttaggaaatgaatcaaaggcattgaatatcgcagttgctgtatacccagatcctccatgactatcggaagttagccaattggcaaatgcgagaccttgtgttttccctgttcctcctgcatctttgtctttgaacgttttggccgttgattctagctcttccaaagtaatggcatgattgccatcttcgtccaattggacatccaagtcatctaaccaatcttgtctaatccaaaccaaattaggaccaaaatcattcgcagtgcctggtagtcccataattcgatcgcctattttagcagaatcaatttggacattgtcaaaagaattgtaaatatttttgatattatcactagcgtattcttcataaacatctgttaaatcagcaatcaaatcattgtcagccaattcctccatctcatctctgctgacaaccattacatctggtagatcgcctgaagcaatggcaagcgacacttgtctggtataatcatcaccatttgcctcaaatgcactctcaatactcacacctagctcttcttttatcagtcttctataagcattatctgcataagagtctccatcagggagtttggagtttggctgcgtctgttgacccactgtcatgacaatatttccatcggtatctgtttttgcttctttgtcttgttcgccactgcatgctgcaagtaagacaacactactcaatacaactgaaccggtcaaaattttatgcatctttttcattcgtaatactccttttattcgatctacgtaatcgtttacataaataactaaaaaaaataagaaaatactactaacaaaacaacgtaaacgtttactctataatagtatcattgtctatacgaacttgtcaatagcgctttcatttttttgtttattacagatatatatctatatcggtatcactagttaaaaatatagtgatttagagactccatcatctcctgtcaagggcagtttaaaattgtgggtttgggggtgcggatgtttttctggaccatttttaaaaatacatctttgtttcttccgatattgaagaggacttagtcctcctaaagttaacttgatccgtttatgattataccagtggatatagttatccaattggtttataaactgattgattgttgtgtttttccagtcacgttgataaaacacctcgttttttaatcgtccaaagaaaccttcatacactaagttatctggtgagcacccctttttagacatggagcgagtcaagtttgctttgttcattcgctcgatccaatctggtcatcgataatgagccccacgttcagaatgaatgattggacgctcttgaccttgaagggtagagctcagctcgtccacaatatagcatagtactcactaattctgcgtcaggatttgtttcaatggtccaactaataaaagctccatcgtagcaatcgacaagcgggaacaaatagattttccctttaggaattttaaactcagtaatatctattaactatttttcatttggtttttttgctttgaagttacgattcaatagatttggttgtacaggagaaatcttctgagcatacgaatggttcgtgcgtaatattggccatattcaaaataataatccacggctattcgtttttgttcttcagaatactttgatttttccggtgattatgatgaagcttcacagataacaaatattcattataccattgacgtagtgcaccaacggacggatagcttaatttccaaatggtagcagcataagaacaatgatattttatattttcaatcttaaaaaaagtatcttatctttatttcccctatacattttcgttttcctctgaaaggttttcattacttagattatttttaccataacaatctaactatccatttctcattggtgttaattttgatgttactttctacacacccaaacaaaaaaagccagaaacgccttcaaataggcatttctagcttaaacaattctattaccccacagacccttccaatgactctttttggaatcaagagagagggataagctttgtatagataattcatttgacaaactaccatatactgacagtgtatattatcaagtactatcatcggtaacgtagccaatatcgtatccaaaatagcaggtagagaagttatttgaggattcaagttattctatttcaaccatgaagttaagtttattaaaaataaataaagatagttggtatttcaacgatttttgtatagagttaatcactttattgatgctaattcatcttgattgttattataatcgcattcaagttgcgtggcgtgcatttggcagaaaatatataactgttctttataaacaaatataagaattaaatattttttatcgtagagttttacttatctatagaattatgtctgttcctaattcagtttgatgaattaactgataaaaaatatctactatttaaagatacaggaataagcaagtgaaaaaatagcatgttattagatggtagacagttccaactctttatttaccttttttgtatgctgcgctgtcaatccaagttcctaaattgttgtatccatcatcacttatataatcatattggccatcaataatttcgtcaaaccacaaatattttccatctggtttttgcccaattattttaattactgattgactagtagttgtcatctggttaaaatcttttattttacctatattaacggccaaaatagcattccctcgcttataactctcctgaatttcatatttaacatattctcgatcaagagtttctttacctatcagcaccacagtcactgatgttccaattaattgattatctatccagttttttatagcaatatctccattacgtttaactttctcaaattcagccttatctacaaaaccagcttcctttgttcctcgtaaagtccagctgtttctaactaccattgctcttgttacatctgcataatggaaactaaaaaaaacccttctcaccatattaatcctcctgaatactatttattaaactgacaatttgttcaacttttttatctacttcttcttcagtatctaatttttctagcgcttgaaatttactttttaaggaattatcaaaataatcactgaaattctcttgaatcttatcaaacaaaaccttacttgcacctttggtaaatccaatcggaactactatattttcattttgaacagataattcaaattcttcaatcactccatctgctgtaactatttcacctgattcacgtttgtttccaaaaacaaaaatactaatcccagactctgcaataatgttttctcgatatcttctccactcatgaggcatatcaataggaagtggtctcaaagaaagtacgtcttgtatgttatttttttttaaatttcttctctgctttagaactcctgaaacaatactattaccaattccaagtccataacctgatactattctataaccggattcagaaagcctatatgctaatttctcgacaaattttaatcctttcgattcagatttaaatggagtataatcaacagcacttcccgaaataaaaatagtttttctcaaatacttttttctaatacttttcaaaatatcagtaatctcagaataatcatctacttcaacaacgtttatcgaaaatctggacaaatcatttatttgtagtcttctttttgtcagttcataattatatctctcttgatcaaaaaaatcctcagaatcgacaaaattttcctttaatatttttctcattatacaataatgaggtctttggttttctctcaaaacccatcttatatctgataaaattctttctaaattagggtctgtaaaactaaatcctaaaaagagaaaagtttttgttaacaaatctccttttaaagtttctttaaataacgcgtatgaatcatcatcatatttttcataatcatctcttgttattactgtcgaactaacatcatctatatcaccgtgcattttataaacaattgtatccacatttggattagttgttgctaactgagtataatttttcttaacctgagggttcttataagcttctcggattgaattttctattagatgatcgtaattagttgtccaataagtttcaataggtaaacttgctagtattcgatgattttcagatatttctaattcttcaccaaaattatctataagtatctgattcaaaactcctcttgatccaccattttcatttttataatattgagccagagtaactaagtctgtttcttttttagaatccaacccgatttctgttgcaggatcattaagtagttccggccaacttacatacccttgtgacatcgataatcctgcacctgcaaatattgctgcattttctttttcaatagcttcagagtacctctttattaaaactttcttgtccattctacccgattcctttcgattcagtaaattgattagagattattgaaaatggtgtttttatataaaatatctaatgtattacttcctttagtgcattccatagcatctaaagcccattttttcaaatcagcttttcgtaaataagttaatttacttaaatttaaagaatattttatttgcagattttcttgcgaagaatagtgctttataatacttctaacatcctcggtgatcatttgaggattactttccaatcgaggattctttttttccactattgaagctgtcgtcagttcgctatacagccatggggaatacgtaaatttctgttcattagtaatttcattgctcaaactaattgaattaggtgtattaagaaaaaacagacattctgtactatcaatcatattatttaaagctgtagaaagcatcatatgaacatgactagttgttacatttcttttatcataatcatatgtttttgtttgttccttatagcaatatttttggtctattttttttaataaatcagaactgtatccccaaaccgaagaatcaataaatgcagtaagaccaaaattttcaaatagccatgatgcaaaacgtatagctaatttttcatcagcatgagagtgagatataaaaatatctgcttttatagttggaaaccaatctttaataatttcgtctgcatctaaaattttgctgtccttagaataataatcaactaaatcattttcactttcaaatagattttctattctcttgttaatagatttttggttgtgatttatttgatttactacatgtgtatatgattgcgagcttgaggagaatgcatttaagtcagcatttgtaaaatccaattcatatgccttatacaaggatatccccccgttcttgtattttgatccacaatttattaggcaacataacatcataccctatcgttacatatcccattcattattataccagtatttcttaatgacatataagggtgtaacataataatttcaaacgaaatgactacaagtagtcattgaagcaaatcttcataagacacctgtagaacatccctaatagctctcaattgatccaacttaatgtgttgccggccgccttcaatcttaaccaatgtttccctagttatagcgattttcctgagctgtaggtctctaatcagctcggtttgaccaattcctttttctaatcggactcgtctgatattgctatcgattacattttctatatcaataattttttcctctttcaagaatagcacaccttttggactaaaattagtcctttttcttataaatattaaagatttggtatgctacaacgggactagtattagtccacatacaattttaaggaggattttttttgaagaaatatgcaatcattctaacctacgctttactcatcggaactataagcgggtgtaccacttctgacacaagttctacaagtacagaaactagtacaacaacctcagaaaagaattacccaatacatttttttccggttccagatggatttgaagcttattatcatgataaaaaactagatgtccctttatcagaaactgaatctactgaaaagattttgccaattgaaattgaaagaaatcaagacgatataaaactaaaagctgatcttcccttactgaacagcacacaaattgatagacatgaaaatatcaaagttaatattgaaaaaggagcgttagcacaactttatactaaaaaagttgaacaattttttgaggctggtgccaataaagacttttcaaaaataagcgattattcggataactttttttaatgaaacacaagatgaaatcacaatctcaacttttatggctgaagatatgtacaagatgacgtaaaaaaaataaaagcttacgaccatccattaaatctgacactaaattatggattaccctcttttgtattagcaggttaagttgattatgaatattcaccagattatttggagacacctcttcaacacgagaacaatgatattaattttagattcgtctaagagttaaaaaataaaacatggttagttgatcaattaagcactataaacactagcttccatgaattacctaatcctgaaagtgaagttgatatggtcattaaaatcttctgaaaaagaagcgttgaaagagtgagctcttcttcaacgcttcttttattgattcaaattgcaataacatttgaacgagtaatctgatttctaagcagttgtaaaactccttgtggcggataatagaatgattataacgattctatattgatataatatatattaacaaaaatagtttttattcgctacagactaagacaagatccactatactcaagtagtaaccgattggttaaattggatttacaaaaagacaccgatggagcctcaaattactccacgtgaatttaggcatacccattgtagcttattgtctgaaagtggtgcttcgataatagaagtacaagaacgattaggttataaagatattaaaactaccatgaatatctatgctcatgtcacaccacaatctgttaagaaaactggtgaccgatttgcaaaatttatgggcgaataattccaaacgtagccaaccattaaaatccaaataaaaaaagctcgaaacgctttaatatcaacgtttcgagcaataaaatagttgttaccccacactaccttccatttaacgattttctatcttaatacgcacaaatgctgttatatcaacaaaaaatctctaaaagttatcttctaaaatccatatattcacaactatttttacaaatagatagtttttagatagcttttttagctgggggcaatcaattgttctataattttttcttcttatcttcatcaaatttccttggtaaacaaatgacttgctacagcgagcttgtacataaatataatcatattacttgcagtaatttagtttatgctataaattagtaattgcgtgcaatactttaagaagagtagttaggcggtgaaaacttggggaagtgcgcctaatactcttcttgtttattttatcattatttcaacgtaatagaaattattgattagaaaatcgtcataaattggttgaatttaattaataaaaggtgtacaggattggtcaaatgaaaatcaataacttttaatgatgaaaattgactgttactacactctttcaaaagagtaatttactcaataagcaatagataaaaatatccaatcgtattcattttcgtattcaaaaactcattggtcctgggcaaagagttttatttttaaaatagaattttcatcgcttcctcaaggtattcttcaagctttagaattttctcagatatttgatgtatctcaatgcttttatcaccactccaatttaattctgaaaacatctcgtcataaacagtttcaggatcatcgatactactttggccgtctctaccaacatacattgcagtttgaacgaattgcacatcatcataactcaaaccttctaaataagagattaactctctttttttattaaacaggcttgaatcttcctcgttgtcaccaatcatagacaaaaattcatcagttaaatcactattaaagatttccggattaattatccaatactctttgctataatttaccgctaacttctgtacttcttttaaaaccatcaaacgttgatttcccaattttattttcactatttcatctcctagtttgattttttatttaaataaatcccataaactaaatgttgtcttcttataaattttgttctttaccgatttggcaggagatttaacaaatcccatcccttttttgccgtacaatggattgacagactttttcactgctctttttgcttttcctgtagttctggcggaaatcgatttctttatgcttggttttctcatgccaatcttcatataataagctcctttttatattgatattaccaattaagtatatgctatcactatctgtactttaagatgtctcatattgacctcctgatatgaaagctataatatattttattctttcagaatctccgcaaagtttttctctaagaactccaatgtttttgatttcaaaaaaagatacttgtcattgccttcccctgggtaatacacaaacccttcagatgattttgaaatgtcgattctatttctataccttgggttttttaaaactttctgactaaaccaatcatattttctatttatgcgatcaagcacttcttttagcgtcatccaccgacctaaactatccgcttgaagcaactcttcatactcaaccttagaaatgatcacataatcttctggcacaagtatctttgcttccaaaaattgttgcataaaagctcctttcttttattttttcactttctcaattacataatacctctttacacatacgtaattcaaactttatttgcaaaaaaaagacacccagccgataagctaggtgccttgtatttaacctcccacaccggcaagtgcctgtttgcttgcacggtaaaatttacggttcattttgtttaattcgcttgggttattcgcatcgacattcccaatgtggatatgttgttccactttagcaggctgtactttgccgccaatgcctttgcgtttttcttcgtctgataacggagtaacagttgtcttaccatttttgttcgtaagcaactctggtccagcttcaccaacgatcgcttggccattcaatacatgaccgccatctgccaaataaggcaaagtggaaatgctaaagcttttgccgcctacgccaggaacccattttggaattttaatgttgtttagtccaccaagaaatgcattgatcaatccaatcattgtgtttagtggtgctttagccatagcagcaatcatatcaaaaataccgccaaaaatatttacaacaccattccacgctcgttcccaatctccagtgaaaattccagttataaaatctataaatccggtgaaaattctcttacctgcattgaaaaagttttggaaattttgaatgattcctccaaaaatattgctaatgtatccgcccataaaattaaatacttctaccgctatatcagaaacaccttggaagaatgcattcacaccgttcctaaaccattcaacattgttataagcccaaactagcccagcgactaatgcggctattgctattacagctacggcaaaccatccaccagataatccgaataatttgcctaacccactccacacagtggccagatctttaaccccagcggtaatcttagtaacggaactcataagcgttccaatgacaaccaaagctggtccgattactgcagctataccagcgagtgtaataatccagtttttagtaccttgatctagagaatcccaccaacctttaaaactcttcaaagcatcgatcgccatttcaaagaaaggcaataagcttatttggacggattcgccgacgtctgctaaagcaaacttcgcattattcatcgcacgattagcagcgtcaataggatcttccgtttctgcaaatgtatcagccactgcaccgccactttcttttgctacttttgctaaatcatccaaggtgaacgttcctcgtttgattgcatcaaccattttatctgaacctttcccaaatacttcattagcaattctcaaagcttctgtttcgtcttttgcattcaatattgaatcgattgttccctttaatccgtcttggagcgataggttgtctttggcataaacaactgaagctttagacatcttgcttaacattgtgcttgagtcaaccccagcttgctcaaatttaccaattaaggtcaccccttcatcgaaactcaatcctaattgtttgatttgaggtgcaccatcaatcgccttcttcataaggtcatcaactgattggcctgtgttctgggaagttttggtagtaacatccaatacatcgtttaaatcatcgtaggatagttcataagcttcgattgattgtctagcataaattgctgcttgcgagacatcagtattattgatatcggcatatttcaataggtagtctgttgaatcttcaagttttttgtccatgaatccaaattgagtattcacttcaccaatcgcttctccgactgtttgtagttctaagtgagtgtttgagccaacattttcaaatgaggtagacaaacgatcagcaacatcacctgttgcacctgtcttttgtataatagtgtccatagcttcatcaacttctgaaaatgcggctaaaccagctgctccaactgccataatcggcgctgtaacgcctacagtcattttcttgccaacgcccgcaaccttttcgccagcttcttcaattttttgtaactttttggctgtatcaatagatacatcgccttgtttttttagtgcttcattcgtttcatccaaggcggcttttaatttgttttgacccgtttcagattcaagcatcttcttataaagtttttcagattctgccgaatacttgccagtttcttctactgatttttcatattgttcccgcaaaagttgagtacgcttttcagcaagcgtcaactgggtttccaatttctttttggtaactgtcaacttctcagttgcagtcgcatttttatccatagcagacatctgattgttgaattcagttactgctaagttcatttcacgattgatccccttgatcgttttagagtaattgacttctccatttgtcttgaaattcaagacaacatcggtttctcttacacttcctgccatattttactctcatctcctttgcattttctgtcttctgatcgcaagaaattcgtcttgcctattcttcatttcttgcattaatttatcgtatttcacaccatctacttcatctctatcttgaaattcatttattaggaactcacaaatttccattcttttagaaagcaaagaaaaatagcttttaatatactctcgattagaactgttcttcttctggatcagccttaaatctcgctcgatcgcttttaacttccgaagcaattctttaaaattggaaattgtctcaaaagagtttcctaagtctgtttttactgtatgttgataccaaatgttatccgccttatctcgcaaaaattctaatctatccattttttatcccccgatcattctctggttgttagaaagttcataaattcatctacttctggacttcctacttttgttttatcattctcgactaccaatctaagcaattctttaactgcggcagtatatctattgatcatcgtgttatatgtcttgactgaagccgattctttgtaaaattcttggctgccattcttgaaaagttcaatagacccatttttattgatatcttcttcaagttctgacaaagtaacattcataaatgaaactcgctcaatcaaacctttgactacttcagcgctactactaggtactccgtccatcaatgttgttagtctttctttctcagccgctattcttgcttcttttgcattctttttcaatgtttgcccccctcccgtgtatggtcctgtgtgtttttcggagttccatccccgattcctaaccaatttattttttataaaaataacggggggataaatcaatcccacaccgttaatcatttaatttattttttaatttcaaatttattatctggcatgccattcagtctaatgatttcatctaagtagttactcactgatcgtttaacatcatggaaataagaacccaacactgaggcgtagccccatcctcctttgtagtattctcgttgaactctctccaatatgtttttgttcttaatgcccaatacatctataagttgtttcattgagctgttatgcgatttgattaactgatcatttaattggaacagtctagtagtttctgttcccagtaaagcagttacttcagcgaatcctttgttgtcaaatagttcttttgcttcagacaatagcgctgcttcttttcggtttgtttcatttttcaactgattgatataattcagatagatactattggtaatctctccacgctcttggtacgcctcggcaatcaccttctcaagatcctcaatatccttattcgcttctttgttagccttgaatgtttctaggctatacttaccttttgctgaagctttcttgtctctcttttcaaccagactatctagctctttctccaactcattgatattgatatcgatctcttttaattcttttacctctggtgtggttactgtgtactctactgtcatgcttgattcgctcctttgattttttctttgagtttacttactactgttttcttaggttctttgatctgtgttactcgttctttcttatattgagccaacaactctctgcggcgctcaatggcaatttcatttgtactgtcttcctcgatcaacttatttaattcagccagcgatagctttttaattgcatctggattttcttccagctcttgcttcatttgttgttcttccaggtatttcttccattctctatagctaaagaaatcatcttctgttttcatttgccaactcctctactttcttacgagtatcaggatctaacccatttgtgttctttgctaccaaggtgagcattgctttgcgtttaaactcagcggtacaaatgcctttaagcaaaaccaacttcttcttatcagataacagtccatcccgatcctcatttagagcattctccacttgttcaggacttagccctgtgacttcgcacaaatgcttctgtttgattttgcgtgtcttcataatctctacaatagtcatttacactttcctttctgcttaatcagtcaaaccatatatcaataaattttatatactcgtctcgaggttccattttctttaatcgaaggtacatctttagctggcgaccctgtgtagagtcctgtttgaatcttttcgctttggacctatcttgcgtgaagatataagaatctggatccgcgcgattgccgctaatgattttgtagtccttcaaataaatagtcccaacgcctagaatgtattcctctagttcgtcagcatcaatttcgataaactcttttctcagccgattgatactagcctgtagtttcgcctctgacttgctcctgatttttcgatattcaagaacagatattcctcttcggtcagccaatactttatctgttataggtatataagttcgataaccgttatgcatataactaaagttggcaccttgttcagtttcgtaatacttctcagaaagaattaaaacatcttcttttggcagctcttttaaagcagtaaatagcaaacgagcatatcctgctgtattcccctcttttaaatgatttctatttaccacaaaggccttccattgagtgagtatccattttgggcgaatgtcataatcataaaccactatccaaacacctccgccattagtgcaatattcgaaaacaaatcgtctgttagttcaaccctttcttgcggcacttcccattcatatctgaacgccatagctgtttctatctcgtatatctcatcgagtgctttctgtttcaaagattggctttcaaccccttttaaaaggctctcacgttcagttacaggcaattcatttaagaagtgcataaaattgcttatgcctaaacttccaccgctctatccgcttgtcaatgagcatacacgcttctacgttatctgctactaaataatcaatcttgggagcttttgcatggatagcaatttcatcataggcaattcctgtgcataggctttggcaataaagttcttgcctgattaatcgtttttcttcttccagctttctgatataagcctctatgttcaaatagcggtttaaattgtattcactatccatgcttccctcctaaaaaacagtattctattatgttgcggctttgatcgttggtctagcttgggattgtcatcatctaggacggctttttcagcaaccgcagtatacagttttcaaaggacaactaataataaaaaacggacacgagacgtctgccatattactggcttttttcgtctcatatccgttggttcttcctaatcagatattattattaagttgtctttattataccatatttgagcgataaaatctttataaaacgttgatatatcagcttttaaaacacttttttcactctaatttatttgttgttttcgtctcatatctgactacttgaccatcttttacgatcaggataatttccccatatttaggtaactcgacacccactgtttttgtttgtttattaatgtatactttatccatactcattgattattctccttattctgcaatttttagtgattcttgccagttatttagatctgcttgttcaatattcgtgattgtttgttccatgctcttaaattggttcctgaacgctttaaggccaatagtccgttcagcttcgttggtagcgataaacatgccgccttcgtatcctctgacagaaacaataggcacccctttggctcgcagcatttgaataactgcttttacgtctcgttcgtccagatcaataatagagcatatatctggtactttgattttcctaattcgctgaatactcttttttctgtcattttaataactccccttcaataatgtttttatttggcaactcttgtttaatttcatttatccattgttctaagcgttcaatagaatcttctaattctaaaaacgcttgacgatctaacgaaagatttttaaaatctgatgaatattttaaagatgaatggttcattaaaatactttcgatagtgttgtttaaattagttatattttcgtatgatttttcttttttgttgatttcaaactgtttgttttttaatttaagcatttcattttttaatgaagttagttcttgattagaagtcgattcctgttttattcgttcttctaaagatttcatctcttctcttaattcatcattttgctttttataaaattcataattcgccttagcagtttcataattccctttgaaaaagttataatcatcaggcactttttcaactacaacttctttctcaataacttgaggttctttctcttgcaagtcgtcaatcatttgtgcttgtaggttgatttggttgtctttggctttgagttgttttttgagttcctgcaactctcgtacagtcatttcgtcaggcgtttttgtttcgcctttagaagtaacgtgttcttttgttcgttcttcttctgggagggtagctactaggtataaagcttcattgcttaaatttcccaacgtttggaaatttacaagctgtttggctattgtcattgacttgctaacaaaatgtttgtccaagccaattgattgataccaactcataaactcgccgtgagctaaatcattctccttcacataattcaaacgtctgccgatttcccaaatcgattgacccgcaagctgtttgtaggaatttatttcagcagttaagatgtttatatctttcgatagttgtatttcgttcaatattcacgcctcctgttttatatctctaattgggttaatgcaatgcgccaccctcattccatctttctttccgtgaaaatgccatttcgaacaatacggacaccagactgcatattgtgatcctgtatcataagcgattaaaattgggtattttctttcgtttttattggttttcagtgttttcactcccgccttcttcagttgcactctcgattgcaacaacagtgtaccctcaatagaaattatgtttctacggccacattggacacctgttctgaaatgcttttatatcagcgtttaaatgtaacattattaattttttttcgtttttacgctggacacctacttggacaccccttcaacctgtccaacatggtgtccaagtgtttttcgttcaaacttcatttgttgtgtttaaaaatgctgatatagcagcgtttatagttatatgtccaaactggacaacgcttctaagctttccgtcggggtatactcatttcttaaatgtaaatgcctgtatctccataatcgtgtacctctaacactttgcttaacttttacaattcccattttctcgagttgtttgctaaacttaggttgtgacaattcacgtaaactttcttggtaacagaatttttgatattcttcgtaaattgttttagaagaatcaccttcgctggattccatatcaatgctgcatttttcttcaatgaacctcataatatggttggattctttcaaccatttatcttttgcttgattcatcttgtctgatacagtcagttctttgcggtctagcgcttctttaaacatacttatgcaataggtggcgaatagtggaatctctttctcaatggccttcaaatcgtgcttagttttaaagctttcgtctatcacgcaatcaaaaggaactacatataagcgcctctcaaaaccgtgtgtgaagtcattgaacgctggcaactcattcgctgaaaatatcaacttcgcaaaattcacaaacataaagtgatcttttcctttaaactcagcagataaacgatccccaccagtgagggctttgagtagccctgttgacttgagaaactcggaatcaacatccgcaaacagattggcttctttctgaaataggttggcaccagcaaaacgattctgtttgttccctaattcttgaagcgtcatattgctggtattgtccttaccgatgacttttgttagaaaatctaagaaagtggatttaccattctcgccgctcccttgcaaaatcgttatcgtttgaaaaggtgcataactccggtagaaacagtatcctatgatttccattaaatgctgtgcgcttttttcatcaccagtcaaatctcgcagccattcgattgccttctctggcttcaaatttgatttcggatctacaacataatcatggctttgaagaatatagtctttagtatcgtgcggtttcaattcgccagtattaatgttgtaagttccgtttttaaaattggccagatacggcttgctattgttaaaaggattttctttcatagtcgggtcaaaaatcttaatcataatgaacttttttgtttcgcctagtttttgctggctccacttattgaaagattccaatttgtcagtgatataaccgtctaaaaagtcgcttaaactatcaattcgccatgatcctgtttttttatcaaacctcgcaccgtagagcaaaccatttgttcggatcattggtatctcgttcataatttcataacctaacttagaagcatttactttagtgtttcctttttcatctgtgtaaatccaagaaggcagtttcttttcttcgccaatcctctttttttgtaattcttgtaactcaataatttcactcaattggctcccaactccttctttgctatcgaatagaatgtttcctccacttctttttcagatagcggttctgaaaagtatcgattggcgactttaactaattcgaatactgcctttacatctactgctcttgccaacaacccccctgtgatttgtgcaatgcgattgttgcgatttccctcttcacatccacatacaatgctttcgaataattcggtcgttgtattcctatatcttgacccgccttttttgaattggcttgtgtttttgtacaattttcttgaagttacgcctcctgtgtcttgcttatagtctttcagccaacgttttgcggcatctaagccatcagatatgggaaataatttttctccgccatggacaataatttgttcttgcttagtatattgtgtcaacactggtagtaactgcatttgcgaccaggtaaggtttgactgatccgcattgtggataatgccatccagtattttatttgaaaagaagtaaatcagtagcttgtattcttgttcattcactggtttatccattggaataactaaccgataacgcacgccttttaacccatgactaacacttggataaagaacataagcaaacttggctagtttttgtttgatggcagctatcaaatcaatttcagatacggtcacatcatctaaatctaaaattaggcaatctcgattgattaaattttcattttttcgtatcaaggccttcatttcaccagctatgaacccatcaattacaatcgtttttaatttcttctgttcttcaggatcatcagaaacattgactttaatcggtgtatattctgaaaagaattgaataatgcttttatcaattggtggttccataatggatggccgcacttttcctatataaatcattcgaagcacctccgcttactgattttttggttctacttcagcaagccatttgtgaagtgcagaatcgtcatcaagctttccaccaatttggacgaaaactttctttatacgaggaagaacgaatcccatttctaagtcaaactctccaggcgtgtatctaactacattcatgttcccaatatatttattagttattttcatcatttatacccctcctatactggataaatttcatcggagacagcttgtatttgacctcggatattttctaaagcttcacctatttcatctagcactccagttcccaattgtttgtttaaagaaaatgtatcttcagttactcgtgaatattcgatattctcgataagacgttcgatgatttttaagtcatttactcgtgctgcaaggttcttggaactggatagcaatttcttttcattcatggttagatcctccttgttccaatttgattgcgtaaccctcggtatcagctgcatgtcttcctgataactctaaaatagatactagcaatgcatttgccatgtttaaatcttctgtagtaatagttccttgcatcgacatttgattgtcaaaaaaagctttaaaccccttcaaagcaaagtcaacattaaatgcatcagtaactaaattttcaattcctaaaatattttccatatttagtgcgctccattctctaattgtgatatactagagaaaagaacataggtatagtacctacgtgtagccatttgctgattccgccaagaatctatacagcaaaggctttttcttttctccatccatagtttttttactccacttcttttaaacttggaaactgactttctagccatgggatcatgaccgctaaattttttcttgcttgttcttcggttaaattagctatttgattttgaagaacaattagatcagcgtaaagtcgtgcattctctttttcggcttctttacactctttcaaaatactttctgcttcttctacaatttcacgtacagaaaaattcttgtacttcttaggtatccaaactaatttcagcatttctatcctccttttaaaaatactattgcggctaccagttgactaacttgctttccactttgcccccagcgactaattaaatttcaaattgctccatccattcatcaacctttttccgattacaacgcttcgtttgattgatcacagaaactggaaaatccaattctttgataaacttagataaattggatcgtgatacttgtagataatcacaagtcgtttccaagtccatccattctgggaaaatccgtttctccgcttcacgctgctttatttcctcctctacgcgattagcaacttctttcaatcgctcttcgaatacgggagtcaaatctacttctaacttcattaatactcatcacctctctctagtttattcattttgaataaaaagaacgcaaaattttttcttttggaactgaaaatatttcagccaacaaaataatttgattggattttaactgttgctctccactctcgatttttctataactggatggatacttatatcccagttttaacgaaacatctagcagcgtgagcttgtttttttccctaagttcttttaatgtacacatacatgttctcctttctgttattcatattgaataactttgtgactttagtatacttattttagaatgataagtcaacaaaaattattcattttgaataaaaattgtgctatactatcaacatatagaaagaaggtgctttttttggattttaaggataggttaaaatacctaagagaacaacgttcttggacgaaaaccgacaccgcaaaaagaatcggcgtgtcaacaggagcatattctaattgggaatatggcaaccgtgaaccgaatcaagaaatgattagaagaatagcgcaagtcttttcagtctcaacaaattatcttttgactggagaaagaacattaaaagacttatctgacaaagaaaaattggaattagctaaacaattaaagaaaacagctacttctcaccttgaagggcgtgatcactacgttcaagcggttattgaatattttgatgatgatgctttttctgaaatgtctgacgaggaaataatattattaggaagaataattactttcatgaacgagacgagtaaagaatccgtaaattctttagaatttttgattcgactaatcaacacggctattaaagaagataaactaaactccgattcgtttaagcgacaatataagcaaactgcagataatcttttgaaaaccttattagattaacctccaccacttgcccccagcagtaccaggagggaataatattggcaaaatttgaacaatacaaagataaaaacaataaaagaaaatggttattcagtggatatgttgctactgatcctattacagaaaaaaagattgtcaccactcgtaagggttttgacaccaaagcagaagcaaggcttgagtttgataaattgaaagcaagcattctaaaaggttctaaaaagaagcgtacaatcacattccaagagctgtatgacgattggttggatcaacaccgcaaaagtgttaaatcttctacagtagcaacaaatagacggtttattgaaggtcatgtattgccaaaattcggcaaattaaaactagaccaaataaccgtttctttttgtcaaaaatgcgttaatgaatggcacgacaaatacaagcaatatcactatataagacgtgctactgctcaggtcatgaattatggcgtatctatggaattaatggaaagtaaccccatgaaaaagacgattcttccacgcaaaaaagaagaggaaaagaaacctaacttttatagtaaagatgaattacacgagtttatgacattcgttaaaacacttgataactataaatactatgcttttttccgtttgcttgctatcactggcatgcgtaaatcagaagcgttggggctgtatattaaagacttgaacatattcaacaagacactaacaatcggtaaaacaatagccattgatgaatacgatcaagttgttttgcagacccctaaaacaaaaaattcataccgcaccatcagcttagatgatgaaacgatacgaattttacaaaagtggtttagtattcaaaaagaagattatttcaaacttgggtttaatacttcaaaggcaaagcagctcatgtttagcaatatgagtaatgatttatattatccacaagtagtaaacgattggcttgattggatttatgacaaagcagaaaaagaaggcttaactttaaaaagaataagtcctcatggtttccgccatactgcttgttcgcttatgtttgaatctggcgcaacgattaatgaggttcagaagcgcttaggtcataaggatgtaaagactaccatgaacatttatagccacgttacaccgcaacaagcagaaaacaccagtcagaagttagcaaactatttaggtttctgacaaatagatagtttttcggatagtatttatgagattgaaggcaaataaaaagccaagaacgctataatatcaacgttcttagcctatagttaggttctaacctacactgccttccatctcataacttatcaatcggtttagctcgacggcgtattccattggtagttctttggtgaatggttcgacgaagcccatgacgatcatttcggtggcttcgctttcggataggccgcggctcatgaggtagtagagttgttcttctgagatttttgagacttttgcttcgtgttctaatgatacttggctgttgtggatttcattgaatggaatggtatcggatttcgatagatcatccatgatgatagtgtcacattcgatgtgagagatagagcctgcgctcttcttgccgaaggtgacttgtccacgatagtttacggcgccgccgtcttttgaaatagatttcgagacgatggagctggaagtgtttggtgcgttgtggatcattttagcacctgtatcttggatttggttcgcaccggcaaatgcaatggagagcatcgtaccgcgggcgcctttgccatcgagatagacacttggatatttcatggttgttttggcacctaagttgccgtcgatccattcgactgtggcaccttccaatgcttttgctcgtttggttacgaggttatagacattgtcggaccagttttggatggttgtataacggcagtaggcatctttcaaggtgaaaatttcgacgatagctgcatgcaaactattactggaataggttggtgcggtacagccttccacatagtggacgctggcaccttcatcaacgataatcaatgttcgttcgaactgaccggtgttttcggcattgatccggaaataggtttgcagcggtacgtcaacacggacgccttttggtacatagataaaggttccaccggaccaaacagctgagttcagtgcagccaatttgttatcggttggcggtactaattttgaaaagtattgcttgaagatctctgggtattctttcaaggctgaatcggtatcggtaaagatgatgcctaacttttcaaactcttctttcatgttatggtaaacgacttctgattcatactgtgccgaagccccggctaaataggcacgttctgcttcgggaattccgattcgttcaaaggtttctttgattttttctggtacatcatcccagtctcgagctgggctgtcgctaggtttttgataatatttgatggcatcgaaatcgatgtcggacagatccggtccccagttttgcatgggcattttgttgaaggcttctaatgacttcaatcggaattccaacatccattctggttcttgtttgacccgtgagatttcacggacgatgtcttcggtcaagccttcaccggtactaaatacgggctgcacgtcatcgtggaagccaaatttatattcttctaattcgggtacacccatggttctcactcctttgttttgctgcaatctactctacttgatgctcatcggtttccgagtgtctgtgttccacatctgattgttgggtatcgtcggcgatcgctttttccaatgctttccatgcaagggtggcacatttgatccgcgcgggaaacttagccactcctcctagcattgaagcatcacctagacggtcactgtcagaaacagtatgaccttggaccaattcagaaaataaacctgacaattctccagcttcggtcaatgttttgccgatcactgcatctcccatcattgaagcactggcagtgctgatagaacagccttcaccggtaaatgccacgtctttgatggtcttcccttcaacggcgagttctaaatgaatcacatcgccacaagtgggattattcaattcaactttataggtagaatctcctagtgttccgcgatgatgggggtgactggaatgatctaatatgacttgtcggtataaattatctaatttcgttaatgccatgttggaaaaactcctttgttaacttgatggcgtcaaccaatcgatcggcgtcctctcttgtattatacaggtaaaagctggcacgtgcagttgccggtacgtgcaaatagtttaagaggggttgtgcacaatgatgaccggcacggacagcgacaccttccatgtctaatgcagtcgctacatcatggggatgaatcccgtcgatgttaaaagctatgacacctgttcgtttggctgcttcttgtggaccataaatcgtcagtccatcaatggcttgcaattttggcaaaacataagcgaccagttcagcctcgtgttgatggatggccgctaacccaagttcactcaagtaatctaccgctgcccctagcccgatggcgccagctatgtttggagtacctgcttcaaacttccatggcaattctttccacgtgctttcttgaagatgaacgaaatcaatcatttcgccgccaaattccactggctccatctgatctaaccaataacgtttgccatataagacaccaatgccggtcgggccgcacattttatgaccagaaaaagcatagaagtcacaatctaatgattggacatcaactgacatatggggaactgcttgggcgccatctactactatcacggcttggtgttgatgggctagttgcgttaactcagcaattggattgatcacaccaagaacatttgagacatgagcaatggcaaccaccgctgttttatccgtgatctgttgacgtgcatcatccatgtcaaggataccttctggcgtcaattggatatatttcagaatcgctttcttgcgttttgccagttgttgccatgggatgatattggaatggtgctccatgtaagagatcacgatctcatcaccttcattgacaaattgatccccaaaactgcgggctacccaattcaggcttgtcgtcgtaccacgagtgaacaacacttcgtcggtttctttggcctgaataaaatggcgaactttttcccgcgcggcttcataagaatgggtcgcccgttccgccaatgtatgaacgccacggtgaacgttggcattgtcttgatgataataggcagcgatcgtcttcaaaacggcttccggcttttgggtggtggcagcattatcaagatagactaatggctcatcattgacgacttgatccaagataggaaacgcttgtttcactttttgggcatcgatcatgcaagtaacttcccttcaataacagccaccagttcttgttgcacttctttcacaggaatggctgttaagacagatcccagaaatccgcgaatcactaagcgttctgcttcttccttgcgcaagccgcgactcatcaagtagtacatttcttctggatcgacacgacccacactggcagcatgtcctgccgtaacttcatgttcgtcaatcaatagaatcggattggcatcgccacgagcttggtcagacaacattaagacccgactttcttgttgggcatcggcacctttggctccttttaaaatatgtccgataccgttgaaggtcaagacgccgcgttctctaatgacaccatgttgcaaaatgtggccgatcgaatgtggtgctttatttgtcactcgcgtatcgatcccttgtgtttgccgaccggcactgatagcaacagcttttacttcagaatgggcgccttcgccaacgaggtctgaatcaaagtcagcaatcacatcgccgtcattcatgacaccaatcgcccaatcaaccatagcgtctcgtaagacatagcctcgtcgattcatataggtagtgatattgacccccaattgatcaatagctgagaatttgactttagcccctgctttggcgatcacttctacaacgatatttccagataactttttggcttgatcccctttggtttggaaacgttccaagtagctgaattcactgtgctcatctgctacgatcaagacatgcttgaagaaatgcgcttggctattgccattatgatagaagattgcttctagtggttcttcaatgatgacattcttgggtacatataaaaataaaccactattcataaatgccgcatgggccgcagtcattttgtcttcatccattgggactgctttagtcatatagtattgattgacgagttctggtacttctctcattgcggtaaacaagtccgtaaaaatgacaccttgatccactagatgttgcggtaattgttcaaagaccgttgtttcatcaaactgaacaaccgttggatggctatccattgcatcaaaggatggaactgcccccaatcctgctgccgctggatcaatcacgccagagaattcttgttcaccgacaagtgctgcttcattgatattaaacaaaggccagcgttcataacggacccgttcaatttttggaaacgggagttcatccacttttgcaagggctgcttggcggagttccaacatccattcaggttcttctttcaacgctgaaaacacgttgacttggtcaagataatcctgtaattttgccatttgccttgcctccttatgcttcttcttctttgtagtcgatccctaattctttactgattccagcatagccttcagcttccaggcgtttcgctaaatcagcagatcccgtcattaccacgcgaccttccatcatgatatgtaccacgtcaggagtgatataattcaacaaccgttgatagtgtgtaatgatgagcgcgccaaagccttccccgcgcatttcattgacccctttagcgacgactttcaaggcatcaatgtctaatccagagtcgatttcatctaaaatcgcaaatgttggttctagcatcaataattgcaagatttcgttccgtttcttttccccgccagagaaaccttcattcaaatagcgttctgccatttcttctggcatgttcaatagatccattttttgatctaatttctttagaaaatccatgacagagattttgtcctcttcatcccgtttagcgttgatagcagctcgcatgaattcagcatttgtgattcctggaatttcactagggtattgcatcgccaagaacaaacctaaacgtgctcgctcatccacttccatttccagcacattttccccatcgaacaagatttctccttcagtgacttcataattcgggtttcccataattgctgcagataaggtagattttcctgtcccattaggtcccatgatggcatggatctcaccggtttttaaaacaagatcaacaccttttaagatcttattatcttcaatttggacatgcaggtttttgatttctaaaactgacattctgttccctccagtatcttttctttctcactattttagactaattgagaatgaagttcaaacgcaattgcctacttttttaaaattcttctaatctagcccctagagatacattggaatcattacaaactgctgtgaggatcccctttgaaagaaactaaaaaaagacaccctcagccccgacgaaagcatgtgcttttgtctttaggaacagagggtgtcctacttgaaaactctaagcttgcacgagcaaaatgatgcaatcaaaaagaagcatcaacatttgcaagcggatgatagagttgattcattaattctgtgtcgcttttacgtccacgattggatagtaggatcacgctggttttgttgtctttagaaaacaacccaaacgattcgaatcctcctttaccaccatgagcccgaaaataagtccctttgtcataaaaacctgcggcataggacccgccagcggctggttgccacatttgcttcagtgaagctttatccagcagtttcccattcaataataaatcataatagcgatacaagtcgccaactgacatatagagatttccagttcctacctcagctgccaagttggctgaggaaatattgttagggttcccgtaaggatctgcttcgccatccgttttgtaattgaccgtaggatgatcctgctgtaaaaaggctttatacaagaaagattgtttcaacccattcttattgataaaaaaatccgttaacaacgcatcataactttttcctgatacttttgtcaaaatacctgccagtaaattgtagttgatgggactatatttgaatgttccttgggttccggataagacagcatgggtggcatcccagtcgaggatctgttgcacgtcttccagcccttgcggattttctgaaagtttgagtccggaagccatctgcagcatttgctgaatcgtaatcttggcagcgcctggaatatacggataaaagcgcgctaatgtatccgtcaaggatagtttcccttccttaattgcccgcatgatcaagaccgccgtcaatcctttttgcatcgagccaatattgaataatgttgccggggtgtttttgacatcagctgctttgtcagcatatccgtaccctttgtgcagcaggactttcccgttttttacaaccaatgcacttccaataaaaccactggaaagaattttctgatcgtagctggctccttcggctgtgacgacttcttggtcactaatgagattgtcatagttccccgcatccaacaagtcctgtttcttgtttgcgggttgctcctttttggaggaggagctgctggcagtactggaatgtgcgacttgctcactgtaatgatcagaagcagccgttggttccgttggcaaaaacaagtagtagatgccaatgagaccacaaatgattaccaggatatcaatcccaagcaatagtttttgaacgtttctttttgagcgtctttttgagcgtctttttgcatgtcttttcgtatgtctactcattgaatgaagcctccagcattcctattctccaacagtcctcctttttcatttcccctgaatatcttttggtgcctcttgctgccaatttttggagagaaaataatggttgatttcatacaacggtttttctttgaccttggaatccaagaatggctgaatgtattcatctgctgccaaccagccacgccagcctaagtgaatcgtatcttccatgaaatagggttgattgcccttcgttgataaatcagcgatattcatgaagccctggcttcttaactggtagcggatctttttgtcaaaaccggacaacacctcttgcggcaagccggtataatccatccacttctgattgatgggcggaatcacaaataagacatccacattgttgcgagcaaattctgtcagtactagttgaaagtcgctatattctggtccaaaacgataatcccatttcttttgagagcctttcattttatctatgcggctttgcagattatgttggtaaaaagaattcttgatccctaaagaattattagtcgtttctgcttttccttcattatcggctacttgttctatttgagcgagattataggtagaaggtaatttctttgcagcagcagtgattttgtcagtcaagttgtgccccaacccaagaccactaaaaagctcatcttcccgtttcaaaatagatcgttgcagatcaatctgttttttctgccaatcagtcggtatcttaccggatttcacttcattcaagacttgttccgtcaagctattttctttcactttcgaatagtctaagagacgttcggcatagtattgatcggtgtcagagactttctttaacgaagagagccaatcgtacacatgctgttcggaataatgatggttgaaatagtctcctttcaaccctttaggaacgaaccattgaggggaaacgatgaagactgcttttttccctgctaattctttcgccattgattgaatgatggcgtactgggtcagcgactgggtgccaggtgcaccaatcaaaaatggcgtataagaacgttgatatttctgcgacaatacggaaggatgggtggcactcacacggtttaattcggatgagccaaaaaatgggacatattttcctgttgctattgcctcatttttgatacgatccccgcgaaacaccacatcattcattgccgtcgccgcttgagcgatgactttcggatcgtggctattgatcttccaagggccaaggaagagtaccccgacaagaatccccacacaaagaagcggtccaaaagccgtgagtagtcgttttttcatcatcggctttgcagcgtgtcgactttctcaatgatttttgctggtgtattccactctgcccggtcaaattccgatacgggaaattcaattcctaactgcccttctagttcaaccagcaattgaacagatcctaatgaatctaataatccttcaccaaaaagatcgattgtttcgttttcttttacttcatcacttcctgtaactgattctaaaatgtctaatactgcttctttggttgtcatattcttttctccttttatttaacgaataatttgtccaagattcctgagaaaatcagaaaactaaagcaaactgcttggaaggtcaatacagtggacaccgctttggttaggttgttcgatggcagatttccttgttttttcttccaacggatccacgcatcatttccgcaaatcaatgtcgcatgatataccccgtataaaatgtaataccaggtaagtccatgccaaatgcccattaacaaaaagagggcaaaatagccgacattggatgcgacgatacggcttttgaaaactttcttcttgatcagtgtgaacattaaacgcatgtacacatagtctcggaaccaaaaagacagactcatgtgccaacgattccagaattctttgatattaggcgccagaaaaggtttattgaagttagctggtgtatcataacccatgaagttgctgacaccaatcgcaaacaaactatagccagcaaaatcaaagaacagatacatactataaacatacatataactcagcattccccaagagaacaagccattttgcagggcttctttggttacgatcggcagtaatacttgaccgagataataaccaagaatgaacttatacaggagccctagcatgattttggcgactcctttgtttaaataatcgagatacacttcttttgtcggcggattcagcagatccttctcaaagcggcgataccgatcgatcggacccgaagaaatcgttggaaagtatagtagaaactggatataacgccaaggatggtattctttgatcagtccatcccgtatctccatgatcatttgcactgatttaaaggtcagataagagatacccaagaaataaatcaatgaggcatgtccaacaaagaaaggggtgactttgctcaatgccaatggtaaaatcgctgctaccactgcaccataaaagacgcctgaagtatttgctcgttggcgatgctgataatagccatagacgagtaatgtctgatacacgacgtatccgatcagcgctagcccctgttgccaatattcaccaccaaaacttacgtacaataccactagtgtgagtaacgtttgataccattgccaacgcttttgtttgaacagcagcacaagcatcatcggaagcaatcctaccattagccaaatgaaataggtgggatttgcataaggaatcatatgctgcaggttcatgaaggattcacctcatttgtcagccatttgcggtcgattttgccatttgccgtatgaggcaactgctcaacatagataaatcgctgcggaatcatatactccatcactgtttcactcagtgaagatttgatggcttttgtcagttggaactctttctcgaaggggtgcgtttcgggaacgacataagcaatcagctgttccactttcttttcttgatatttagggactacgacggcttgtttgacccacgaactattgcttaaatgatggtcgatctcttctaattccattcgatacccatggaacttcacttgaaaatcaagacgcccttcataatgcaacaaaccatcttccgtcattctgccactatcgccggttcgatacgctggttgcccttcatggacaaaaaatgcctcttttgttttctcgggattgttcagatacccttttgacacgctaggaccactaatgatgatctcacctacttgccctttaggaactagttgatcttcttccataaagaaaaccgtcgaatcttctttcacatacccaattggcactcgatcatattgctccagtaattcttcagtgatttgcactccggatacggcaacagtcgcttcagtaggtccataggtattgtagatttttgcatttggaaaacgttccagcagtgcgtgagcggttttttttggtagttcttccccacagaataagaaacgttccaactgaggaacgtgcatcccgtcaaaggtctcttccatcaaacatagtttcataaatgaaggtgtcgagatccaaacattgatagccaattgcggcaaggttccaaacaatgttttgaagtcattaatgaccgccttttttaaaggcaccaaacagccgccagaagtcaatgctggatataaccccatgacagagagatcaaaggaatacggtgcctgtgccaaataatgcatcccttcgcgtaaagaaaaatccttcaatgtccattgcacgaaactcaataaatttccatgactaatctgaactcctttagggatgccggtcgttcctgatgtgaagatgatgtagtaaatatcatccttccctagtacttttgtagtgcctaaattgcgcccactttgatagatttcttccaattgatttatttctagcattggaatcattgtttccggaccttgccagtcagctacgctaatgatcaaatctggcgtaaccacagagaggatcaattcaatacgctcttttggcgtggtactttcaatcggaatatatgcccgacctgttttggaagctgccaaaaaggctgttagcatgtcaaattctaactcgccataaaccacgatcggtccgcgagtttccagagtttcctcgagataggcagctaattggtcggatcgagctgctaattgtccataagtatatgttaggtcatcttctcggtaggcaatcctctctggatccttttgtgcccattcttcaatggcttgcacaatatttaccacgttcatgaacattcctcctaaaattcattatagataaaggtgccaccttgcacgtttttataatgataaagataaatcagcatcaaaatgatacagaaataaaaaagggttttgcctgcaaagaagagtgcttgacgcacatgttcatttttgattcgttgtttcaccaaatccctccttttcttgctatattgattctagaatgaaggagtaaataattgaccttgaaatgttaaacaatttataaactggcgataaactttttatttcatttattagtttttttttaatctgcttacatttttgtaatacaaaatggctttcacgaacaaaattgtcatctcttcataaaaaaagcaagaatctctttaaacagcacctatgctgaaaaaagattcttgctgctatattttttggcagcaactaaccactttgctgcaatgttacgccttaaagcgataccctgctccccagacggtttgaatatattgtggattggtgggatcttcctcgactttttctcttaaacgattgatatggacggcgacggttcggatgttgcctagtgcttccatcccccagattttttcatagagttgttctttgctgaagacgatctctggattttccatcaaaaagagcaataactcatactctcgatgtttgcagtcaacttcgattccatccacgtaaacccgatgcgtttgtgaattgattcggataccgcctaattcgatttcactagatacagtttctgtctgttgtccgcgcttgatccgattgtattgtgcaatgttcgctttgacccgagcgacaagttcggttggcgaaaaaggtttcgaaatataatcatccgcacctatacctaaacctcgcagcttttctaattcttctgacttggccgtgaccataatgattggaatatcgactttatcgcgaatgtttcgacaaatctcatgtccatccattcctggcagcatcacatccaataggatcaattggtatttctccgtcaatgcttcatgatagcccacacaaccgtcgttaacgatatggacttcatacccttccatttctaaaaaatctttttcgatcattgaaatatcttcatcgtcttcaataattaatactcgtacactcaacttcgatcacttcctttttgatttaactgggagggtgataacgatcgctaatccccctgctggatggttgtacgcttgaatcgttccattgaatccttcaatgattttcttcgaaatcgctaagcctaagccattgcctttgctcgggttggttcttgagcggtcatcgcgatagaaaagttcaaacaagtcttccaaattctcttccgaaacaccgctgccgttatcaatgatcgacaagataaactgttcctcaactacttcataagagacgaccacttgtttatcgttgcgatccacatacttgcgggcattttcaaatagatttgttaagactgtacgaaactgaactggatccacttctagcgaaacgttttgatccgtcggttccaatagaatcgtcaatccattcaattcgtattcctgctggataaagccgatgtattcatcgatcagttttttactagtagttgtcactagattgaaaggaaattcaccggtatccaacttagaaaacaagaaaagctgtgcaatcacttggtccaaatcatcgatcttcttttttacaatcgtaaaatatttggtccgcatggcaggtgtattagcgatccccttctctaatccttcgacataggctttgatcgaagtcagtggggttcgcagatcatgggaaatacccgcgatcaattctcgacgattggtttccagtttgttttgattatccatcatttctttcagctgacgtgccataccgttgaagtcttttgagaccggtaaaaattcatcttgcttcgtatactggatctgatattgcagatctccttctctgattttatagaaacctacagtcaataattccaaaggatcggtaatacttcttgtgagatatcgcgtcagaacacggctagtaataaaaataatcgacaaaatcaaaatcacgactaacacgatgatccgagacaacatcgctttgtaatcgcgatcccataatggatcttgataatacaaatcattgtaataatttgaattgatcaagataatcttgtagttgctggtatcaaatgtcgtaagaaaggtttgatcttttaagtaactatgttctccctcttctttaagagcagtttctttcattttttgatctgttacttcccctacagacgaaattagcttgtcgccgcgataaaccagcaatgcaatatttttgctatgattggtctttttgaaatgttgcatgtcggcgactacttctgcatctgtcgtcttctccgtatcccatttgatcaccagactttcaaccgtcgcatactgggcacgaaattcggtattcttgatcatggctccttcatctagcccccagaaataacgccagaccattaaaaaagcaatcactgaagctaataagctcaataaaactgggacaataatcatcaatatatgcgatataaataaacgctgcttgatagtcattcttttcctcttctctttgatagcgatgattcaacatagttatgcagccatcatttaaagtgttctctttgaaaaaattgggatcgcctgttttcacgacgtgatccgcctcttattgaaaggaggtgctgtctatttttttcgattttagcccatacttataggtacttcaaccgatgccttcagtcagttgtgaaagagtgaattctttcttccttgcacacgcaatgatccgatttcttacctttttaaataaagaaaataaaatttgattatcagaataataaaaactgagccaatactatagtaacaggaaatagtaaacaaaaagtaaactattgctaaaaagtaaattaaatacgaaaagtacagcccggcttctccccctaacgcaagactagctgctaattgcggcaactgtatttgttctttgagacagctttcgttatactaaaaaaaaatggaagaaaggacatacactatgacagtcagaattgaagaagtgtcccagtctacttggcgtacagttgctgccttaaaagtatcagaatcccaacatacttttattgaagacaacaccacctccttgctggaagctgcatatgatacttctttgcattgggtcccgcttgctttgtacaaagaagaaaccattgtcggctttgcaatggtcggtgcctataacgaacaagaacaaagtatttggttggatcgcttgatgatcgatcagcattggcaaaaattaggcttaggcaagaaatttatgccgttgctcctagactatcttttctgccattggacagtggaaaaaatctatttaagtgcccacaaagagaacaaaacgatcttttcgttttataccgcttttggctttaggcatacccaccacatagatccagaaaatggtgaactgattatggtatacaagaaaacgactgcgacagaacctttctaaaggttcttcgcagtctttttgcttgtttcaatgaaaatgcgatagtcgggtttcacctgacacttggactaatttgaatctgtctctattctattcgatcagtcactaaaggaatatcgattctattacttttgatttcgtcagggatcctatctgaatcattgcaatttagtaaaggagttaagcgatcgtctatccttttttcaattgctgcaaaagctggatgattccacagcagcaaaaatggtttcaaagaattgatagcaaattttagcgggttcggatttatcttgcttttcaaatctaaaaataagaaatggtacccattagtcgcagctcctaatcttcttatctctaaataaagatattccaagtctgctcttcttatgtgaaatagttcctgttcctgctttttcataaacaaacaatggttttcccccaacttgattatgtcaatcgtatcttctccaatgatacatttgcaattaggcgttccagctgaacatttgacaaacccttgaggatattccttggcgtcaatttcaatcagtgctgctacccgctttccatcgagtaacattttttggatgtcatttgaaaatgtactataaaaccatgattgattactcgtttgcttgtccatttacccagctcctccctggcatacttgttcaaaaacgtttgtctataaaaggcgccattctatcattaagagtagtctactattaagaatagtctacttcttacttctcaaacatacaataacattttttattttgaatatatttttttagcttacttattttgagcaatgggcttcgcccaaagtttcttgcaccatcactcgtcttattctcacaaattccacatcatggattcttctcaaactcctattcaatgaatatacaaaagaagcacagaagtaactttctgtgcttcttttggcttgttttgattcctcactttgcacgttctttcgtgacgtttgattcgtcaatcatcagcttttactgactggaatccatagctcgcttttgcagtcgggtttagacaaatcggaactttcatgccacaaaagttcgggtcctccagttaattgataatcagacattgccagccattcgctgtaaatacgcgcccaagtttcttgaactgcttctggaaatggtcctactactgtaaagactgcccaatcagattcttccacttgtaacacatcataaggttctgatgctttttgggtagttgctacaccgacatactgatcaagcgctgttccttccacttctcgttcgacaaaatttgccgacacactgataattcctcgcggctggatatttgccagatttttgagttccataatgcgctctggcgtcagcttttcatacagtgatgtcatttgcggattctctccctgatactgcagcgtgatcctttttttgaaaccgacgatttgaaaaggttcattgtgcacgatccgatagtccattttgttacctcctttgattgtcagctggaaagtcattggtggaaatgcttttagaataacatccagctgttttgcttgtgagggagaaatgccatgcatcccacgaaaggctttgctaaaagcatccgacgaatcatagccaagtaacgttgcagtgtcgattactttcgctccttgtttcaacaagtctcctgccaaaaccaatttcctgcatcgcaaatattcgcttaaagacatacccgccaaataggaaaatacccgccgaaaatgatattccgaacaaccagctaatttagccatgtgtgtaaaatcaatttcttctaacaagttttcttctagataggccattgcctgattcatattctctaaaggattcattcgtcttctctcccatctcctacacaataacaaagttcaaagaacgtcacccggtattatcgttgcatgttttatcggttttagtcaaaagtattttttgatgccccaagtatagcatagaacaagaaattcctttaaatgcatgaacgttctctatgttttaaaaagtgtatttgtaaatagatctatttttttgagctgtcgatgtactgattcctaaagactaccgcacacaaaaataccaaaacaagaagataggctccttgttttggtatttagtcgtttactcatcgatcgttcttaatgaacaatccttgtctccacttaagaatcgacatctcgtaatcaaaaagaactgctaccttttattttcgtctttttattaaatagaatccaataaagctgactaatccaattcctataaggtttaaataactttttgatacgtcattggtttgtggtaattttgcttttgattctgaatctttttgataatttgtattttctttcttagatgttgatgtcttgtttttttgctctgaagtggatgtttttgctggagaagcatcttttgtatatacatatgtgatggtttgcggctctttccctagctttccgatccgattttctggtaattggctctcatctagatgataaccattgatcgacaactgatattctttcgtagtagcatcatagtgatcaccgatatttccttgaatggttttcgctgcatgaatttctttgccgtctttgtcaacatagacaactgtcacagctgccgctctttctgaatctttgcctttatccgaattcttcgtatacacatatgtcacggtttgcgcttgatcactcattactccagtgccattctttggcaactgtttcgtgtctaatgtataaccattgatcgttagtttgtatacatccgtcgtagcgtcgtagtcatctccaacatttcctgtaatgacttgtggtgcgtggatctcatttccatctgtgtccacatattctactgtgacatctgcggctgcttcttgatgattgatcgcaaattgatgcaaataggtacctgaagaaatcgcgtagaagctaaacccatctggttgtgcatatgtcccggctggattattcagacgtgaattgtatttcatcgtatgaataccttcaaattcttctggggttatatcagacacagtgacgtcttgatctgtaatagatagctgagaagaagggagttgaaccccgtttaagtcaaaatacgtttggctttgactattggatgttgaaaaaggtggaacatagccatcaaaatttgttagtcgattgggcatgatcgaaaacgggacaaaaaatgactgcgttgcagcatcataattcagctccttagcagatatcgtagtcactccatcacttcttcctgtattctgcccataagccgccagattttctaagacaggaaaattgttgataacggtgaaatcgctgaccgcacaaaattgaatccgtaattcctttaaattcggcaatgtagccaatggcgcaatcgtagtaatattcatattcgactcaaaagtaagtgattctaaattcttcatttcaagtatcttcggatagacagcatctgtgacattagcagaagaaaggttcaatcgagtaaaattgtccccaaaatcaggaacattgtcatctgtaacattcgctcccattaaataagcatagactaaactatctatcttagttaataccgaaaaatcagaaatctgattggttccattcatgtaaaaggaagacaggcttgtggcatactccaaaccggacaaatcagcaagagctgaatcagtcgaataaatatagattgtctgcattttactgattttttctttagtgatttctgatacttcgattcctaatgccttcgccactattgactgtaatgtaggatctggtaaccaactagaaacatcctcagtattggcttgattatcaggcaacgaatttgcgaactgttgagcatttgatggcaacaaacttctagctgatttttcctttgatttggcagaacttgtatctggaatcgatgattcttctgtacctactgttgatgctgttgatgttgttgatgcttcactctcagaacttgattcctttgaatcagaagtaacactttcagaggtagaagattcagtaacagtctcaactgaatcgttgctagtttcttgggtggtgtcagactgtacagagtcgtttccctccgctgctagtactgtcactacgggggtagccagtggtgaatttaataagacaaataaagatacatagctaaatatttttcgtttatttttgatctccttttttgctaatcattaccttttctttttttaaccatattctcattttaataataataatcctaaaatggaaaatagtaaagttataacttaactagtgaaatatagcacgaacgttacgcacttttcacaccccaatcacgccatttcatttgctaaaaattaataactactgtatctgtagaccaaagtatttctaggaataatggtagcaaaaaaaatagctgtacctgctttgactttgcttcaaacaaaaatcagtgtatctacgcttactctcccatgactttcaaaaaaggattgcatctaaaattgtaaattgatcagctgaaataaagctgcttcttagcttcctcgtctttcgatattgtggagcaagacaatcaataacagttggcgacaaaaaaagaccagcaaggaatatccccagctggatccacaaatagatattttttacgttttagcagttagatctgttatcgatgccaacagacggaacaaaaaatcccgtttattggtacagtgcagtttttttcttacctgcccattctttggttccattcttctcgcagcacaccgtattttactgagtcataatagtggccttcccaataacgaactctacggatttgtgcttctttcgtcatgcccagtttttccccaaccttcatcatccggtgattgcctgaccaagtcgtatatccgatccgttggatgagtggttcttgttcaaataagaatgtgatccacaaacgcatcgcatgactaccgaccccatgattccatatagtggcatcatagattgctacaccaaattcaagccattgatgcagattgccatcttcccaatatgcagtggcgattcctacaagccttccttgataataaatagccttccgtaatggattatttaaacaatttttgccaaatccatttttgaattcttcccaggttaggatagggtcctgaaaataaggtccatcccactttttccactctaagtcagctttaggaccataactgatcgaccaaagagcagaaaggttttcttcggtgattgatttcaattgtatatgatttttcatctttctccttttcaaacatcaaactgctgaaaaataaaactgaagctacttgtttttaccaaacaaacgttgaaaaaagccatttttttcggacgctgtttctttgactaccactgtaccatcggtgtccttccactttctctgaaacgtaagattatcttgtaaaagtaatccatttaactcgaggataccttttaacccagcaatcgttcggcgcaactcaccgtcttgttgaccatagaaatccttcttcccagcatcttcaagttcttctagttgccggattaactctcgaagtgtttgagcctgatctcccagaatagccgacatctcttccacttgacgttcttctatcgttggtgccgtttcgtaaatagtcactaaagataaactatcgacataatcctttaagtcaaaaagaaacgtttggcttgcttcatcttcaaccattgatgttttcattaaatagttttgtaacgcttccatttgtttttgctgaacgagtaaatctaacactaaggcctctgtgtccatcggtaccacctcctactctattgttgcgtttttcttttgcttcgtcaagaaaagcttcgagaataatgttgaaaaacagacgggctgaatagtaattgttttctctactgtatattacatatcacataccacttcttttatagtcaaatttactagtttctgcaccaccctacagttaactcaattcattgtatctctcaactacaaaaaatatcccctcggcagctaagataccgaggggattggtgcattcattgcttagccgttataagcatccacaatgatttgtttcaattcagaaatcaatggttctttagggttcgcagttgtacattggtcttcgtaagccaattcagccatacgatctacagttgcatccaatacttcttgagtcacgccttgtgctttcaagttcatatcgataccaacggatttacctaattcgtaaaccgcagttgctaatgcttcaactagttccgcagttgtttctcctttaagacctaagaatttcgcaatgtctgcgtaatctgtgtcagcacggaagaaatcatatttagggaacatcgcatgtttttgaggatctttggcattgtaacggataatatgcggtaaaagaatcgcattggtacgtccgtgaggaataccatattctcccccaattttgtgagcaactgagtgacaaatacctaggaatgcattggcgaaggccatacctgccattgttgatgcgttatgcattttttcgcgagattccatatccggtgttttcactgatttttctaagtagtcaaagactaacttgattgcttgtaagctcaacccacgagtgtaatcagatgccattaccgacacataagattcaatcgcatgggtcaatacatccatacctgtatctgctgttacagaagcaggaactgacatgacgaattgagggtcaacgatcgctacatctggtgttaatgcgtagtctgctaatgggtatttcacatgcgtatcgctatctgtgataaccgcaaatggggttacttcagaacctgtaccggaagttgttgggatacatacaaattgagttttttctggtttgtcgatcttgtatgtccgtttacggatatccaagaatttttgttttgcgccaaagaaagatgtatctgggtgttcatagaacatccacatgcctttcgcagcatccattgctgatccaccaccaagagcgattactgtatctggtttgaaatcaaccatcatcttcgttccagcataaacggtatttgttgatgggtttggttctacatctgagaagacttcgatcttcacatcgtttttgcggcgagcaagaacttcgcgaacggtatcgcagtagccgaattgaaccattcctgggtcacaaacgatcatgacacgttcaacattttccattttctctaagtataatagagagttcttttcaaagaagatttttggcggtaatttaaaccattgcatattatttctccgtttcgctacagttttaacgttgatcaagttcacagcagaaacattacgagaaacagagttctttccgtatgaaccacaaccaagtgtcaatgaagggatcatttcattgtagatattaccgataccaccttcagcagatggagtattcaccaagatacggcaagctttcatgcgtaagccaaatgccaattgcaaatcttcattttctgtgtggataaccgctgtatgtcctaatccacctaaatcaagcatagcttcacatttttggaaagcatcttctgtgttgtttgctttgatcattgctagaactggagaaagtttttcgcgagataatgggtaatctgcacccacgccatctagttctgcaatcaatagtttcgtaccttcaggcaccttgatgcctgctaattttgcgatctccattgctgaatgtccaacaattgctggatttacagcatatttgccttcattcatcactgcatcttcaagtttttgcaattcttttggttttaccacgtatacttgatgagcttcaaactctgctttaacagctgcatagacttctttatcaacgatcactgcttgttcagaagcacagatcattccgttatcaaatgttttagaaacgatcaaatcgttgaccgcgcgtttgatttttgctgttttttcgatgtaagaagggacgttacctggacctacacctagggctggttttcctgttgagtatgcagctttgaccatgcctgcaccaccagttgccaatacgatggcgattcctgggtgattcatcaataagcctgttgcttcgattgatggatgttcgatccattgcacacagttttctggtgcaccggctgcgattgctgcatcacgaacgatccgcgctgcttctgctgaacatttttgagcagatggatggaaagcaaacacgattgggttccgagtcttcaatgcgatcattgctttaaagatcgttgttgacgttgggttcgttgttggagttaccccacagacaaccccgactggttcagcaatttcgatcaaccctttttgtttgtcttcattgatcacgccaactgttttgtcatgtttgatgctattccaaatatattctgaagcatacatatttttgattgctttatcttcatagattccgcgacccgtttcttcaactgccatttttgcaagcggcatatgtttgtctaaggctgccatagccatttcgtgtacgatatggtctactttctcttgatcaaagttttccatttcttttaaggccacgtttgctttttttgcaagatcatcgatcattgcttgtacatcgatcgtcacttctttttccaatgtcttagccattgtaatcctcctagttcgttaacaatttatttgttaattacttcacatacacatcatacaataactcttttcgtttgtaaacaatttctgtgatttttttcacagtttttttaaaaataagttaaatcaagcgttttcaacatatcgagttattttaatctgatgtttaagtgactcgagtatccatgtgctttattgaacaatcgttgcttttatcaagctttttccaagaaaaagaaccgatatatttgattgattctcaaatatatcggttcttagtatgatggatactgattttggttttgcatttacatagatgaacaataacactctattgtccaattttgaaggagcgtgtttcttcagaggtgatttttttcaaaaattcactcaatagaatgattgtttgcaaataatcttctttgtggatgattaatcttgaggaatgcatataccttgtcggaatcgatactgtcattgcaacaactcctgtcattgctttatggatgttgcaagcatctgtccctccaacagtcatgaagtcatgccgataaggtagtttttgtcttactgcaatctcttccatttttgcaagcagttcactattaccgatcgttagcgaatccaaaacagagagtacaggaccttttcccagttgcaatcccccttgatcaaagggagtgtctacagcggtagtgacatctaacgcaatcgccaaatcgggcttaatgctgtgggcagctgtacgggcacctcgtataccgacttcttcttgagtcgttgccgcaaagtagacatcaacagctagctcttctttggctaaagcgttcatgacctcaatacagacacccacacaaactcgatcatcccacgctttccctagcaagtaattcggatcattcatttcacgaaagaccgtcttaggtgtaaccatgtcgcctaccattattcctaactggcgaatatattcagctgacggaacccccatatctaaataaaattcattagctgggatcactttattcttttcttctggcggcatcccgtggggcgcgcgacttccaatgacccctgtgtatttcttgccttccatcgttgtgacacgcatttcctgtgcgggcatgacgtgtccccaccagccgcctaccggtaagagtttcaaataaccttccttggtgatttttcgaactacgaaaccgacttcgtccatgtgggctgacaacatcactttgggcgcattcgctttagaactcttttttactaagatcaatgaaccaaggttgtcataaaaacagaaatcaactgctccttctgcatatttcttcacgattctggatatttctttttcccggccgccgataccatcggcttcacttaattcttttaggatttctaagtctacagctctcatagggatcgtctcctagcggttttcttctttgaatgaaacaatcgctgcttcgtctaagtctttcagaaaaagatagatggcttgaccgactgtttcataatcttcttgcgaaacaacttgagctgctgtgttcatatttcttacaggcatgttcataaataagactggacatcccgtccgtaatttgttgaaccaagcaccgtctgagtcttctaatgagaaataatattgatatggcaatgctgcctcttcacagatttttctcaattcttccatcggcaaccgatttggcaaaacggaaggatcataatatgtcaatagaactccttttgagagttctccttgtacatcgccagcatcttcctgataatcccaggctcgatttgtatctaggatgatcgttaggtctggtgcaaccagattcgctgctgtttgagcacctctggcaccgacttgctcctgaaccgtacatccaacatatagatcaaaagggaagctgagttgattttcataaatttgacgtaacaaatcaatcgtttgattgacagaaatccgtccattccaatttggagcgatccattcttttccatttttgctgacagtaaatttgggcgcaaatgtcaccatatctcccaaagaaacttcttctgacaatgcttcctcttttgaagaaaaaccaaaatctagtaaaacgtcctcttttccctgaacctggtttgctttgtttcgtcctaaaatgacgcctgggaaggctttcccttgtcgattgtacaggtggacttcctgtcccaataagctattcggctcgattttccccattatcagtccgcgaatcaagccggtttcttcgatttttttgacaataaacccaagttcatccatatgggcagtcactaaaacagtggttggattctccttttcagatttgatgaccccatagatcgaacctaggttgtcatagatgatttcatcgcagtaaggtgcataatactctttcaataatttagagattgttttttctcttccggaaattccgggagttttgaccactttttcgagctgatccatttgtcccatctgctttaccactccttagtaacaatgttccttcacgtaatccgttgtatcttttttctctgctttcaactgacaaagagtcaacatttcgttcattgcttctgttaatccagtaccacccttttttggcatttttacaatatctacttgatctttaaatcttgtgattgcctcttggcattcaatggacatcgccgcaacagcagggatctgaaccttctcttcgacaactttcgcaacttcagcagccatttccccgtatgtttcataattaaaacatggaccgcaaagcaacacatctgcgcctaatttctgtaccattgcggcaatctttaaagaagattccttcgcatgctttcggtaatagtcatcaccacaataaatcgtggcaagaacctccatattcttttcctttaataacttttcgaacattttgacagaaccaatcgctgtcttttgcccccctaatggctgatccccatgttctttcccaccaagtccggcttgaatttgatccagcaaaaagattattttcattgtgatcccccttctataacaagtgatcgatggaaatatcatcaaacgacaattccagttcttcacttttggcttgttctgcttcccgttcatccttcaggtattgcttgtctaatgccataatgaatggatagtagatcaaacaaccaatggctaatagaatcaattgccagacagaggcaaccagacttcctgtactcaaataccctgagaagccgatcggggtcgtccatggcaatgaaacgccggttgtataaggaatgattcctaggttggttaccaatgttgataaaagcagattaaccattggaacagcgataaaaggaataataatgattggattcaatacgactggcaaaccaaagatgattggctcattgatcccgaaaattccaggaacgagcgaaagtttccctagttctttgatccgttttgatttacagaagaggaccatgatgattacaagggaaagtgtagaaccaccgccgccaaagttggtaaagaagttcgaaaatggatccgtgaagatgtttggcaaatctttaccagcttgaaaggcatctaggttttccatggttagaattcttaagatcggcgcaaatacagaattggctaccgccggaccattaatcccaaagaaccaaaaaatcgtacaggctaaactatagaaaatctgtgcggttaatgtattaccggctccttttaatggcatttgcaagacattaaagataaaatcatggacggtaccaaaaggggtcataccaaataatatattgatgacaaaaaataagagcatgactagtgcacttggaatcagcgcagcaaaggatttcgttacagcaggtggaaccccatcaggcatcttgatggtccagcctcgttttgttgtataagcataaatttctacagaaataagtgcgacgagcaaaccgacaaaaatcccatttgttcctaagtgatcaaaagaaagcccgctaattggatctgccactccttcaacgatcagcttatttggtgttaaaatcaaaaacgcaatcacggctaccgctgccgcttggatgggatcggttttcttttcccgtccataagcatacgccgttcctagacatgaaaagaagccaactgtattaaagacagaaccagaaacccgagtgacccacgactcccaacctgtaccaaacattcctgcccaaaactctgaccaccctggtattggaaaatttgcgaacagtaagaaaatcgatcctacaatcactaatggtgtcgtgatcaaaaagccatcacgcactgcgatcaaaattttgttctgccctaactttaccgcaagcggcatcaacacattttctaatttatcgaacattccactcttcctttcgagatcttgctctttgcaatcctctttttttgaaatcataccggtgctttgatgcgtgcttcatatgcatcaagccactcttgcgtgatcggtgtgatcaccgtggtttgatctggaccaggattggccatataaatagccgcttcttggtcagctgtcgcaacgctaaatgtgaattctacatttgttgccaccccccatgccccatttttatccaatgctatcaacgaaaaggcacctgctttgccataacgtttgcgtaatcgttcttcaaacccataaacagcccggtcacaagcggcttgtggtgaaagaccttctcccatcaagcggacgatttcataagaaagacagcctttcatcaaatcttcacccaaacctgtagcggcagctccgccaatcgtactgtctacataaaatcctgagccggataatggcgaatctcccactcgaccctgttttttcatgaacaaaccagagctagaggttccgactgccatttgctgttgcgtatcgagagcaacaacgccaaccgtgtcatggccatcgtaaggatcgaggttggaagcagcgatttctgctaatcgtttttcccagattttttttgcccgatcggtcaacatattcttacgttcaaatccagccaacatcgcgtattcggtggctccttgccctactcgaaagctattgaatttctcatcactcaattggcgtgcaactgagatgggattggcaacatcggtaatccctgcaacggcaccaatcttaaatgtttcaccatccataaaagcggcatccatttcgacgattccgcgttcatttggcaatccgccataaccaactgatttataaaatggataatcttccactgctttgatggcagtttctactgcatctttgcatgacgcttgtccttctaaaagttctttggctgccagtacaccatcgtgtgccattcgccaagttgcaatcattccccacatatctttccctccatcatttgtagcgcttacaagtatattctatatggtatatactagtatgtctatactaaaaaacgagtttctttcaactctcattgatttataagaaactcgtttcggattttttttattgttgaggattcatccagggcattcttattctgttaatgctttgatgctgcgcatgtagatctctaaattcatccgtaagtcagcactgtccatgtactcattcttattgtgtgcaatccctttttgaccaggaaaagacggaccaaatgccaagatattcggcattttgcgtgcataggttgcccctgttgtggttactggtttagggtcattgcctgtgactgtgtgataaatcgtcgacagtttagctatttcggttgattctttgtctcggcaaaacccgggaatactgcgaatgacttctaattcgacaccgataggcagttgccttttcaaacgggacaatacgtctgtttctgtaacagtcactgggtagcgaaaggcaacttccatcactaatcctgtgagagacttttgtatcacgacaggcgtcaaaatcaatttaccagaatcttcatcagccagcgccaagtcaatcccttctccaaaatgctgctgatgaaagctttgacagatccaacgaaaataagattgtatggttggaggaatagtttgtttctcagccagttgggctgccaggatcgaaattgcattttctcccaattcaggagcattgcttggagaacgtttccctgtgacttcaaacttctgatcggcaatgcttacactcaagtcgtcaggaacatggtctcggaattgatccccctgaaacgaagtgagttgctgtagttcatcgtctggcagcggaaaatggagcgctacattgacgacccctcgttcgccatagactaccggatacttacaatctggcgtaaatccgaacacaggtggttgttctgcggccaaataatgaggaacatccgacataccactttcttcatccgtaccgaaaatgatccgcagattttttttcggttggtgtcctaattctttcaataatttcatcccataaaggcaactaatgattggtcctttgttgtctagaattccccgaccataaaggcggccgtctttttcgcttaaatcaaacggcggaaaatcccagtctgaacccgcaggcaccacatcgagatgtcccaggataccgatgtagtctgacccttctggtccccactgtgcatagccgatcgcatcatcgatcacctttgttccaaatccaaaagcggcacttttttccattaccaaagacaaaactcgccgagtttccgtaccatagggcgcctgtggcataggttcagatttgacactaggaacttgcatgacttgtttgagtaagtttagaaaatccagccagttttcctcaatggctgtgctgatttggtccatttttgccaccccttatttttgacgtaccaatgtatttttaaaggtatatttatctgcacgataaaaagatgtatcgaacaagatcggtttcgcagaaggggaataagtcatcgaatggacgagaagcattggttcctcttcggatacatgcaatagcttggcaatgtctggcggacttttgaccgcttccacttcttgatgggaataaccaatctcaatgttggcttcgatcacttcatataaagaagactctaactgatctttggtgatttcgccggactctttttctaaataacgcttcaatacatagaggttctccaccgtcatcggttcatcatcaaaataacgcaaacgagtcagatacaccattggttctttcccatagttgccgaacatctgtcggatcttagtcggtaattctttcactgtctctacttgtaatacttcggttcgggtctttttcccttgggctttggccgtttcggtgaagctttgcaatccgccagatccactctggatctttggctgcttcatcacatacgttcctttgcctttttctttgactaggatattttgggtgatcagaagatcgatggctttgcggacagttagccgactgcattgaaattcttccgctaaatcataatcagaaggcagcttctgactcgttacataagtgccatcattgacacgttgggcgattttatctgctacttcctgaaaaacggcttgttttttcacttgattccctactttctactctaccattcataaaatggacgattcgcactcacaccagaagccacactaacaaaggcctggttgtcgacggattgaatcatcccttcaactgtctttaattctttttgggagatgactaaaagcaacaatttcttctgttgatgatcaaagcccccctcaacatcattgatcactgtgatccctcgctgaagtgcacattgtaatgttgcaatgacaccttctgctttttcggttactactagtaattgcacacgcctttgcttgagattcacgtagtctaccattcgaccactgataaagaaagagattgcactataaaaagtgtacggccagccaaaaatcattccagcaacgagttggagactgacattgaaaaagataaagaaactgccaatacttttgccggtcattctcttcactaagatccctaaaatatctaatcctcctgtggaaaaatcatcgtttaaagtcagaccaacggaaaacccatggagcacaccgccaaaaacagcgcagatgactggatctgtagtcaatgtgacaactgggaccaccttcatcataacagatgagaggaagacagtacaaaccgtcataagcgcgaaatcacgatcgattttgcaccatgcaatcgctaacaatggcgcgttaaaaaataagaccaacacagggattgaccactcgttaccaaagtatacttccaagagctgcgacaataattgtgaaagtccagtaattccactggcaaatatatttcctggcagccagaacatattcaatgcgatggatgataacagtgcataaatgagtgcaacagctaatcgttttattctttttggcataagcatctccttccgcttcgattatagtatatatcattaagtatatactgtcatcaaaaaacttattttctttaaagaaaccgcctttgctgatccatagtctttctcaggatcgaggggtaaaatttatcctgacatgcgggctagaaaaagagagtaaaatacttgaaaactgactaattttgactaaaataataattggaaagaaaaataaagaaaggattgattattatgtcacatgagattgaacctcgtcgctcagatgcctatagtatgacaccttttaatttcttcgaagattttggtcgcagtttttttgatggttttaaagcgaacatgatcaaaacagatattcacgaaaatgattcggaatatctcgttgaagcagagctgcctggtattcctaaagaaaatattcaagtcacttatgagaatggtattttgacgattgctggtcaacatcaatcggatactacgactgaagataaaaaaggaaaactagtacgcagcgagcgtagtttaacaagtgttcgtcgccaatatttgctagaaaatgtcaaagaagacgacatcaaagcttcttattctgaaggtattcttaaattgactttgccaaaagatgatcacggcaaagaacctaagaaaaccattccgatcgagtagcagcatcacttttaccaaacaaacagcccccttaacagaaatgcttgttaagggggctattaatgtagaaaaagacctgttctccatgctttgcttgctgatttttttgctcttgctaaagaacaagcgaaaatctggacaaacgccactctataaaaaaagaggctgggacagaggtgctaaactcctagaaataagaaggaatacgcggaaattgcttctcaaattttggggtatttcgacttgtttccgaaggagttgcttctgctcccaccatctagacgtgtttagagcgtgggacaaaagttttttttacttttgtcccacgctctagtcctagctgtctttgtcagacggatcgaaaaaaattattcttttgtatcgtctgcttttgttttatcaacaacatcagctggttcgatttcagttgcaacagatgcaccagtaccaggtgtcacggtacgaatcgctgcccgatcgaactctaagaaaataccttcacagtcgatgacaactgtactcttgtctgtatttacttcagaaagaacgccatgaagtccgccaattgttactacgcgatctccagccttcatattttccaataagttttttcgttcttgctgttgtttcttttgtgaacggctcatgaagaaccacattgccaccaaagcaacaagcataaagagcattggtaaagattgtgccatttttttcacctcgatttttttacttttctatagatactttatcagaatctgacgtgtattcctaccgttttaccagaataaattagaaatttttggcattttctttattgaagccatattcttcgaagaaatgttgccggaattccagcaagttgtcatccatgatcgcttgacggacttgtttcatcaaattcaacaagaaataaacattgtgataagaagttaatcggatcccgaatgtttcatcacatttgatcaaatgacgaatatacgcccgtgagtaattcttacaagtataacaatcacagttttcatcaattggtcggaaatctcgggcaaactgggcattcttcacgactaaacgacctttagacgtcatacatgttccgttacgggcgattcgagtcggtaatacgcagtcaaacatatcgaccccgcgaataacgccgtcgatcagagaatctgcggctcctacccccatcagatagcgaggtttgtggtcagggatccatggtgtggtaaattccaagacgcgattcatttcagcttttggctcgcctactgacaaaccgccaatcgaataaccaggaaagtccatgctgatcaaatcttgcgcactttgtttccgtaaatcttcaaaaccggccccttgaatgatcccgaataggccttgagaatctggattggcatgagctttcaatccgcgttctgcccagcgagaagtccgctctactgattttttgacatactcatagctttcatcgaatggcggacattcatcaaaactcatcatgatatccgaacctagtttgttttggatatcgatagctttttctggtgaaaggaacatttttgaaccgtttagatggttcttgaaatggacaccttcttcaacaatatttcgcatatctgctagtgagaaaacttggaagccaccagaatcggttagaatcggctgatcccaattcataaacttatgcagcccacctgcttcggccactagatcttctcctggtcgcagccataagtgatatgtattacttaaaatgacaccagcgcccatggctttcagttcttccggtgcaagggtcttaacagtagctaaagttcctacaggcataaacattggcgttggaaaagtgccatgcggtgtgatcaattcacctaaacgggcacctgtatgtttctctttcttgatcagacgataacgaatggcaggttgcgacattcatttccctactttctttatagactcgattaactgtgcaacgctattaatgataagggttgcgttaggaatttgcaagaaggtttcagcttctcttcctctttttcaaaaaaactttcctttctttgctttattttttgtacaatccatgctcatttgctatcatgttaaacagatagaaaggaggtttttttatgaaaactagaggacaactaaaaagtgaagccaaatccgttctgaatggacgctggaaagatagcgtattgatgtgcttggtccctacgttgatctctattgcttttgctgttgtgatcgtagtgattgttgtgttgcctttgatggcattaagtcaaaatggtgcctttgatagtcaatccatcaatgaagcgtcgaactcaactggcggtagtggcggtggcttgatcagcggattattctcagcattgtttggtgccgggatttcttggacattccttgatttgttacgcggcaataaacaagagattcgtccattttctgatgtctttcgtggatttagcggtgtattcgcacttggtatcattgtcatctatattttatcaacgattttcgttagtttatgggcattattatttgtgattccaggaatcatcaaatcctattcctactcacaagcatacttcatctactatgatacctatgagcaaacaggtacacggccagattttcttgcttgcatcacggctagccgccgattgatgaaagggtataaaggaaaactgttcttacttgatttgagttttattggctggcacattctagccattatcacagctggtatcgggtatctttggttgacaccttatatcagtgctaccaaagcagccttttatgaaaacttgccaaaacagacattagcttaaaaaaaggaccttactttgacatatcaaagtaaggtcctttttgattgaatgaaaaattgttctcaacgtaatgtttcttccgttaattgacacgttttgcttccacagcatctttgactgaattcgcaacgattttggctactccttcttggaaagcatccggaataatgtttgttggtgacagctcctcgtctggaatcaagctagcaattccttttgctgcggcaatctgcatctcaaccgtgattttacgggcttgagcatctaaagctccacggaaaataccaggaaaagccaacacattgttgatttgattaggaaaatcactgcgtccagtaccaatgatataggcacctcctgctaaggcttcgtctgggaagatttccggtactggattagccatagcaaaaatcacaggcttatctcccatctcagcgatccattccttcttcagtgctcctggagcagaaacaccaatgaagatatcagcacctttcaacgctgtctgcaaatcaccagaaagatggtcacggtttgtcactttagcaatctctgcgtgatgaggtggtaactgatcattttcttcattcaagatccccaccttgtctacgacaatgacattttttgcaccagctgccaaaaacttacgagtaatagaaagtccagcagaaccaccgccattgacaacgattttggcttctgctagtgatttgccaatcaatttcaggctgttgaaagcagccgctaagacaactattgccgtcccatgctggtcatcgtggaaaatcgggatcgcacactcttcgatcagccgctgttcgatttcgaagcaacgcggcgcactgatatcttctaagttgattccaccaaaggtcggtgcaattgctttgacgatcgcaataatctcttctgtctcttgagtatctaaaacgataggaatagcatctacatctgcaaatcgcttgaacaaagcggctttcccttccatgaccggcattgctgcttctgctccaatattaccaagacctaacacagcagaaccatcgcttacaacagcgactgtgtttttctttgttgtcaatgaataggccagctgtttatcttctgcaatcgcggaagatacggcagcgacacccggagtgtaggcaatgcttaagtctcttcgattttcaatcgccgcttttgatactacttccaatttaccgccatgttctttggcttgtcgcaaagcgatttcttttacatcttctgacatgattcgttcctccaatagttgatcgttttttctattttttattaaaaaatcattcgcaagattgcggtcatggcaatcactgtgatggcgccgcctaaacgggtagctacttgggcaaaaggcatcaagttcatacggtcagcggtacttaagatcgctacgtctcctgtgcctcccataccgctttgacaagcagaaataattgcggcttcgatgggatacatgttcatgaaacgtgatacgacgaacccggtggcaattaccgtgaacactacactgatgacgactaagaaataagagacactcagtgttcccacaacgtctttcaatggaatatacaacaatcctaaaccagccatcaatgggaaagtaaagttgccggaaataaatttatacaattgtttggagccatgttgtgtttctgccggcaccacattcaagtatttcaaaaaagcggctaagacaatcatcaatacaggaccaggaaacccagtcaaatgctgcagtaaactaccagcaatgaacagtgtacaagcggtcagcacaccagcgcccattttcttgatatcaaaagcgccggaatcatcttttaacgcatctgccatgtcatcatcatttttcattttgaccaattgtccacccccagaaagatctggtcgtttttctccccagcgagagagcaatgcggtacacatgatcgcgaagaaattaccaatgatcgttgctggaatcagttgtgcgaccagctgttcactccccataccagtaatggcactgtagcctagtgataaaggcaagattccttcaccgatcccgccagctaacactggagtaacgatgaaaaacaacgtatgttgccattctaaacctaataatacaccaactagcgtaccaacacccatggcgcagatcatcccaatcatcatgggaataatcatccgcatcaaaccttggactaagattttgcgattcatccctaaaatactgccgcaaactaaacaagcaatataaaaatataagaagttggcttgcttcatcaaaatatcggcagactcaagaatattcggattgactaagttgaagaaaaccaaaatagatggaaccaataaagataaaattgccggaccaccgaaattcttgataaaaggaatagtggcaccaatcgttcctaataaccaccctaaagtcaaaatgaccgcaaaaccacctagcatatttacgggtaattgttgtaacagacccgtgactacgatgactgttgataaaacaatgtatactggcagcggaactgatccaattttgattttcatccaccgatcaattagcttctcttcttttgctttagattcaacctgttctctcgccacatggggttcgatatgcttttccattttgctttcctcctaaattgatctactagttctacgagtacctcgttacacacagattaaagcaagcgttttctttttcgtagtttatttaattattttaagtatttaaattaattaaagcgtctttagggattccgccgctatgttataatttacgaataaagggggaaatgtagtgaaaaaagggttacggttatggggggtattgactttagtctttacaatcgtcttactcattgtcacttccattctttatggtttagtccttattcaaaattccacatttattcgctccaacgaagaacacctgctcttgtccgtcggtaaacagctggcgatcgatccacaagtgactaccgctttggaagaaggacgttccaacgatcaattggaagcttacacaaatgaagtgacacacatacacgggttggatttcgtggtagttatggatatgcaagccattcgtttgactcatccagatgagacccaaatcggcaaacacttcgaaggcggtgatgaagtcactgcattggaaggaaaagaacatgtttctgtcagtgaaggaacattgggtcgctcgttgcggggattcgttcccgtctattccctcactgaatcgcaaaaacaaatcggtgtagtagctttagggatccgtatgcagtccttgagtgctttagtaaagagttctcgggaagggtatctacttgccttagcattaagtatcacaatcgccgcctttgcagcaactggacttgcctattatttgaaacggcaacttcataatttagaaccaaaagaaatctcacgtctctttgaagaacgcaatgccatgttggaagaaactaaagatgcggtcattgtattggatttgaaccaacaaatcaatttggcaaatatcgccgccaacgagctttaccaaaagaacagtggacacaatgactccttggtcggcaaacatttgcaggatttgatcttgcagaccgatgctgtagacttggagcgaaatgttgaacagctctatcggcaaaatggacaggattttcttttttcctctgcaccgatcaatgtggatcagaaacggatcggttggatcgtgtttttgcgcaatgcgacagaatcgttattcgtcatggatcagttagccaatactactgcttacgccagtgcgctgcagtctcagtcccatgagtttatgaataaactgcatgtgatctatgggctcgctgatttaaaagcctatgatgaattgaaaatttacctggatgatattttgactccagaaaaagagttctctcatcgcttgtcttttttagttcagaatccgcaagttgctggatttttgattggcgaacgtcaaaagttctttgagcgtaaaatccacttgatgatcgagatttcaccagaaattcccgccaattcgcaagaagttgaaacaaaatcgttgatcgatctttaccggtatattcatcatgttttgttgcaactaaacaccatagaagatttgcggatcgagatccatcatgaaacaggcctgctgacaacgacctataccattcagctgaccacaacggatcagcagcaattgcaggatagttttcacagcaactatttccaacaaatgttaaaagattaccaggcagagtttttgatagaagaacaacctaactttgtcgttctccaattacaaacgcattatcatggggtgataaaatgaaaccattacatggattaattgtcgaagatgacccaatggtggaatttatccatcggaattatttagaaaaaatcggcagatttcaagaaatctattcggcagatgctgtgacagatgctgaatacttactacaaaacaaacaagttgatttagtgctgctagatgtccatttgaaaaatggcaacggcttagacttgctcaaagagatccggaactctcagcaagccatcgaagtgatcttgatcacagcagccaatgagacacaaactattcagcatggactacatttaggtgttctggactatctcgtcaagccctttacctatgaacgtttccggcaaagcatcgaactatttctaaaacggcaggaagctttggaacaagacagtcttgcccaagaaaccattgatcaaataatggttgcaaagaagagtcccgagtcatcccttacagaactggataaaggactctctcctgataccatggatcgcatcaaagcggctatccaaacatttccagacactttcacgatcccagacttggtagagatcagcggattttctcatgtctcagtccgtaaatacatgctttacttagaaaaaaataactatgttaccagtcagattatctataccaaaatcggacgcccttataaagtttaccaacgatcctaacaattagtggactctctctaggaacgtcaacgagtgattgctgatttgctgattattgaataaacgatgttttagtaagtcagctttttagattttaaattgtgaattgatcgttgtactttgtataccctacctatttgcaaacgcttcctaaatatgctatagtataggtgtaaggaaggtagcaactctgttggtggtcttgtaaatatcgcaaactcaatctactaaaagttgttgaacgtacaagtttcacctagtatcaagcgtgtaaagtaacagaaaagcgtaacacaaaatcgagaatcttttcgaaaaaaaggatacgtctattacgttgtatcagtacacacgaaacatgtgtaagtttgtaaaagaaaacaaattttgagaaacaattgctttgcatgaaccaaccatcagcgaccaccacttataccttcccttagttataagctggacgacaaaaaagcagttcaaaaagttgagaagtatcccaacttaacgagccgctcttgtcgttcagttttttattttaagaacatggcatcgccaaaactaaagaagcgataacgttcatcgatggcatgctgataagcttctaatgttagatcgcgtccggcaaaggcactgaccaacattaccaatgtcgatttcggtaaatggaaattcgttgagaaggcttggacaactttgaactgatagccgggggtaatgaaaatactcgtccagccgctgtcggctttgatatcgccatcaaatttggtaccaatcgtctctaatgtacggatcgaagtcgttccgaccgcaacgattttcccaccatttgcccgcacatcgtttaattgagccgccgcttcttccgtcaatcgataaaattcactgtgcatttcgtgatccgcaatattatcgacgctaactgggcggaaagttcctagacccacgtgtaaggtcaaataaactaatttgacccctttatcagcgattttcttcaataattctggcgtaaagtgcaaaccggccgttggtgccgctgcagatccattctctttagcataaacggtttggtaacgatctggatcttccaatcgttccttgatgtatggcggcaatggcatttcacccaaagattctaaaatctctaagaaaatcccatcatagctgaatcgaataattcggccaccatgttcgagttctttttcaacgaccgcttctaagcgaccgtcgccaaaggtgatcttcgtaccgacttttgctcgcttggcaggtttgattaatgtttcccaactgtccccttcgatattgtttaacaataaaatctctagatgagcgccggtctcgattttctcgccatagatacgagcgggcaaaacgcgagtatcattcatcacaagggcatcgccaggagctaattcatcaataatgtcataaaaatgtttgtcttccattgcaccgctttctcggtccacgaccaataggcgggaactggagcgatcgctaagcggcgtttgagcgatcaattcttccggtaactcaaagtcaaaatcttctgttgtaagcatgtcgtcactctctttctttcatatgcccgtctattctatcatgtttagagattactcgccaattaggaaactaggcatagctttaaataaaaagagcgctagagagagactagaaccttttcacggtgctcctaatctattagagaattttaaccgataacacggaatcttctgccttttttatctgctttatcgttttgtgaataaaacaaaattttttcacgtgggattttttcttgctgagcacattttttcaatgtgtcataaacataactgctgttgtttttataaaaaaccatgacttttttcgagtcaatttctttgcgatagtcttcatatttctttcttaatcgttcaacttctgtaacaatctctgaatctttattccaatcgggaattgcagtaagcaagcaaattcgtttccagtattctttttccattattcaaactaaccacgaaagacatttaggttgaactgctaacctatgctttacgaatcacttcgtctctatcgattcacttctatcgaaaattcataaagccatcctttcattcctttcttaatcgctccaaggagaactatattcaaaaaatgctacttgttccattacttgtcctattcaacactgggataattaagaataatacgataattatcaataaccgctttgatgttttggccgtcagcaaaagatacttcaaatagtggactatctttttttattgaggaaatttcaatgtttagatacttaaaatatgcccctaaaattttctcaggatctatctcttgaaatgattgctctgggtaatatttaaattggacgattttattagtcgattcctcaatcagggcttccccataaccttcgatcgaagaataattgatttgccaataaacagtttccgaatcaatctttagattctgggataacgtaaccaagtattctgaagagattcccatttcttttagcagcttctctatttccaccgcatatgtattgacatactggcttccttctcccgtattattatattgcgttactttcccggcgttcgtgagcacttcttctaatgtacttttatttgaaggcagctccaaggattcttcaaatacgactggctttgacaatgaatctgtaaacagcatatttggtaaaaatagtagaaatacgttgaaaccgacccataggaggatcagacttatctttattcttttcctcatcttcagtcctcatctaaaggaaagtcgatcgtaataaacgttccttcacctttctcactagtgatcgtcacttgcccttcatgaagtgagataatattcttcactaatgaaagccctaagcctaaatgcccagaatttctagtgacatcccccgtaaaaaattcatcagtgacttgatcaataatctcttcgggaattccctgaccagtatctttcagtataaaataatatcgtccttcattactgtagccagtgatgcacatctctttcctatccttcatcgcatctaatgcgttagaaaatatatttgcaatgactaatttaaataggttaaagtccattcgtatggtggccttttgaagagtcatctgcaaaaggatccgctcatctaatccagagacaaattgagtaatataagagtcaatctggtctgtcgatattgcttcgagattcatttcatttttcttcgagtacaataaacgcaaaacatcttctgataggcttttcaagcggaaactttcttctaaaatataatcgacaaattccgaagaaggttcctttagatcctcccactgcaacatttgcgcatagccgatgatcgacgttagcggggtagaaatttcatgggataaacttgagacaaataattcttgcttttctttttcctgactgatttgttctatgtcttgatttaatttattggccatgtcgtttaggctgttggcaagcttttcaacttcatctccacgtttttcaacaacgaaaggctttgttgtttgcccttttgcaatctctgttgcgcgatcaatcaatttttgaatcggtttagtgatgagggttgataaaaaccacgacattggaatcaaaacgatctgcaaaagaaataaaatcattcgaaaataatgacttgctttcttcagaatactttgataagtgattagattctgcttagacaccaaataatagtctgtcgttccaattgtcgagcttgtaaataaaaacttctcttgtttgattgtgataattgggctaatgttgattgtgttcttcttaattgaatcgtaatcaacaacctctgttatgcttggaaagtcagttgtactggcatacacactctttccttctttatccaaaatttcaaaatcattctttaccgtgctcttgactatatcacttagattccgtaactgctctttcgtaggttcttgatcttcaattttggctgcaaatagtatcgcagcacttttttgggtagctagtgcttgatcatattcctgattgattgcatgttgagcgatgatccgcaaactgatggtgctgatccctaaatacaaaagtaaaaaaaagaatagcagccaatagaatgcttttgtcgcatatttcatcttattcctccaataagtaacctacaacataaatcgttcgcagctcgttttccaaatgcagtttctttctgatccgctgaatgtgtaaatcaagagttctgctatctggctcacttggcgattcccaaattcgttgataaatcgtttctcgctctaaaataattccgcgattttgaacgagataaatgaacaattgatattctttaggcgtcaatgcaatcaactcattgttaaaaaatacacttctcttctcgtcttcaatacggatgttgtgccaatttatctcagaaacagaactctttttccttctgcgaagtactgtttcaactcgagcaaataattcttctagttcaaaaggtttcgtaatgtaatcttctgcacctaactttaatcctcgcactttatcatgcaaggtattcttggcagttaaaaagataactgggatatcaaattcgacaaaatagtctattaattcatccccacttatttctggtaacatgatatctaaaagaatcagatccacctcatgattttcaatgtaatctgcggcacttttgccatcaaaaatcgggatcgttcgatagcctttttttgcgaggctttttactagcaggttatttatggcttgattgtcttctactatgagtacatccatttgatttcacactttcttcccaatttttgtaaagaagctgttttataagctgatagccgatcatgataccgcacaaaaaaagatagagcaaaagtaaaagtacgatcgatcgattgtcaatatcttcaaaatcagcgaaaattttttgaagcgcttgattgtgatgcacaaaaatatctgtactattaagacgggtaaatcgcccaatataaatcccaatagaatccataaataaaagacacgcaatcaaaagcgctgggtagacaccaatggttaatttctctactaatattcttgcaatcttgtcaatgctccagcagcccaaaattgttgaaggcatcactgccaacaaaatcagaaaaagtttgatccaattcattaaatccttacttatcaacaatgttacttcatcataaggtgtcaataaagaaagatgaaatagatctgtcatgagataaaaattatttggtaaaaaaacaagccagagacacacaactaccactataatgtacttttttttacaatacattgcaagaaaggttaattctattggaatatatgccaaaatagtattagtaaagaaaagaaaatagacacttgattgataaaatgaaagatataagattcccagtaaaatcaaataatataaccgaatcccattcattgttttatttagtaaatacatggttcctcctgtcttaacgcgctctcctagccattgtcccactatttagaaagaacagacttcattaattgggcataaacactgcgtccttccccattcaaatgagtttcatcatcataaaagtattctgggtggtctttgctgtggctaaaccagtcgatgatattgacattcttgtagcgactaggaagctctgctaatttttgattcacagattcttgacagccttccggacatttgatagttatccagtatatctgtttatcctttaattgagtaaggatttcatcgattgactcatccgaaataataccatttgtacccagtccgattactaccgtcgaataatcagctaaattgggatacccttgaagaatcgttgccaaactagatatttgccgtgattctttcgcatcaacggttgcttgcccactaaacgtatcttccaattcttgatatgctccaagcatcacagaatcccctagaaataagatatttcctttttgattgggttgattctctatctttttcagattactgcttaactcttgtttcaattcgttttgatccgcagtcagacggttagtcggtgcaaaaatgatcattccgattgcaacagcaacaagacctgctccaaggtaacgtcctgcttttctttttaaatgcatgaaagaatgaaagccagcaatcatcagaaccgtcatgatcagaaccactaccaattcaattagaggattcatcttaggtgctatattcactaggagaataaacaccgaatagtgaaccaaatataattcataactaattttgcctatatattgaagacggaatttggcgattttggttcttttttccacttctttgtcatttatcaaaacgagtaatagcattgttaatacactgacaagcaatgagctacctgtaaacgaaggcagcggaataaagacagccagaatcaaacaactcatgatgagccaaaacttcgttacttttttgaagaaatgacatcattaatgttctttctattgaaaaaaccaaacatgccaactataaacggataaagtcgagcaaaggtattgtaataagcgatagaaaacggcgataacagactggtgagaatcgaaataatggtaagaagatacataagctgatagcctctttttctagacaaacgcatgactgttagaaagaagagtggaaaaactagataaaattgtaattccaccgccaaagaccagtaatgtttaaatagggacgaatttgcgaagcgatcaaaataagagactttttcgtggatctgccaccagttgttatatccaaagagtaaacttggaagttcacttttgatgtttcctagcattcggatttgaatactcccagctatcagaataaagataagtaaggagaataaaagaaacggataaatccgtttgatccgtttcttataaaagccaatccaggagaactgttttttttgatacgcataggaagcattctttgccatcaagtaacccgaaataacaaagaaaatcgttacgccttgatttcctccttgaaaagaatattgaggcaaatggtagagaataacagcaataaccgcaaatgccctaagaaaatcgatgcctgctgaatagtgtttatccatgtttaacctccggctggccgatgatcattttctccgtaataagtctcattgctggaaggattattcaaaagagtagctaaagacacaaattgataatcttttttttttaaatcacgaataatctcagggactgcagcaatggtttccggatgaatgtcatgcaacaaaataatcgaaccatcatagacagaactcgttactttatcaatgatcatttgggcatctttagatttccaatcttctgaatcaacagaccattggatgatgggacgattgatcaattctgcagcttttgcattgacagaaccatatggcggcgaaaataggctggttttttgcctgtgagtttcttgatagattgatcggtcttcgtgatctcattagtcattccagattcgttcaatgtgctgaggtcttgatgatcataggtatggctaccgatagtttggccatcctttgcgatggctttcaccacctcgggatacatctctacgttctgtcctactaaaaagaaagtagctggcactttttcttttttcaatagttccaataatttaggtgtattgctgggatctggcccatcgtcaaatgtcaaagcgacctttttttatttgaaggaatctcctctgtctctgtagtgctttctagtatattttccaaactagtctctgtagtagccttattgttacttgtcactgttcttgaagaactactgttgcttgttaactcggaggactgggacagattgttctctgtttttcctctagcaaattcctcactgattcgtgcacagccgcaaagtactaacaaaaagataaagccagttatgagtaaacggatctttttcattgcttttcctccttatttgttgtcaatacatcatgaactcttgctatctcttctgtcgaaactgtttgataagagattccattctgaatcaattcctctccgatcacttggtcatgaataattgttggctctttcatcagtttcttcgcatgaagaacaagattggtaatgggtagattggttttgatgttatctgtcaagatatcgataaatgcattccattttgtgacttggttcaattgcgccatattttccaaaacacctttcagtaacaactgttgccgcatttgtctgccatagtcccctcgtggatcctcatacctcattctcgcccaagaaagtgcttcttctggagataacgttagtttacctttaggaaaatcgaatccatcagaactaaactcaaattcattttctacttgaacagctcctacttctttgagaatcttttgaaaatctcccatatcaatagaaacaaaataaggaatttgaatatccaacattttttctactgttttaacggaacagcttgcacctccataagcatacgccgcatttaatttatcctgcattccttggtctgcgatatcaactaaaagatcgcgttcaactcccattaatgtgtattctttcttttttaaattgatatgagcgactatcatactgtcacttcgaccagaatccgttcgcccaaactctccagtatcaacgccaagtagcaaaacattaaaaggttcttgtttcaattggtcgtaatctaagtcatactgctcatctgaaggattcaatttttcgtacacttttgtatttattttatttgcagaatagactgcccagccagtaataccaccaacaaggactactgaaacaaaaagcaaaataagaattattttccgcatcggaacacctcctgctgctaaattaaaggaaaaatgtatctgaaatgtatcgatttagtatttggtgactcgatacatgctcgcttgtagcagcaatgttcgcttttaatttaatattaaaatgttgtatatcacttttagtgaagaagaaagtctactcatccccatttaaaaataacaatcaaaatgaagaataatgcatatattccctattggattttcatttcgattggatttgtttcaaacattttgcttataatatgcaaatatgaataaaaaaggcagaatatttgaataacagcaaacttttgggcatactaattacagaccctaggcgtaaataagctgcgcctaaataaaactagaggtgaaatcatgattgaatttcagcatgtatccaaaatctataaaggcggcaaagtggctgtcgaagatgtcaatctatcctttgaaaagggagaatttatttgtttcattggtaccagtggtagtggtaaaactacttgtatgcgaatgatcaaccgtatgacagacccctccaaaggaaaaattctgattgatggcaaaagtgtgaccgatatcaatccagtagaattacgacgccaaatcggttacgtgatccaaagcatcggcttgatgcctcatatgacgattcgagaaaatattacattagtacaaaaacttttgaaggtcagtcaagaagaacgaaataagacagcagagaaaatgatcgatctggtggaacttcctcgtgaaatgctggatcgttaccctcacgaattatctggtggacagcaacagcggatcggtgttgttcgggctctggcagccgaccaagatatcattttgatggatgaacctttcggtgctttggaccccatcactcgcgattcactgcaagatttgatcaaagatttgcaggaacgtttaggtaaaaccgtcgtcttcgttacccatgatatggatgaagcattaaagttagctagccgcatcgtgatcatgagcgaaggacgcgttatccaattcgatacaccacaaaatattctgcgaaatcctgctactacctttgttgaagaattgatcggtgaagaccgccttctgcaagcaaaaccagacaccacaccagttaaagaagtcatgctcaaaacaccaatcgccatcactcctgaaaaatctttacaagaagcgattcgcctgatgagagaaaaacgggtagatacattattagtgacggataatagcaatgtcttaaaagggtatatcgatgtagaatcgatcgaccgcaatcgaggcaaggtaaccagtgtcggggatattcttaataaagatgttttctatgtaaaagaaaccgccttactgcgagatacgttgcaacgaatccttaaacgcggtttgaaatatgtgccagtcgtggatgctgagaatcatttggtaggaattttgacgcgtgcttcattagtcgatattgtttatgacgttatttggggcgaggaatcctcccttcttgaagcgatcgaatccgcaaaaccagaggaggtctagccatgcaaagcttctttaatgaatatggcggccaattggtcacgaaaagcattgagcatttatacatctcctttgccgcattatttctaggcattgtcgttgcagtccctttgggcgttctattgacacgctttcccaaagccgcttctatcgtgatcggtgtgactagtgccttgcaaactgttccctcattggcactgttggcattgatgatcccgattttaggggtcggtaaggtcccagctattgttgcactctttatctattctttgctgcctattttgcgaaacacctatattggcatgaagaaagtcgattggaattatcgagatgtcgctaaaggaatgggaatgactaacttccaatcgatcattagtgtggaactgccgttagcgatcccaacgatcatggcaggtatccgcttgtcagcagtctatgtcttagcttgggcaaccttggcttcgtacattggtgcaggggggcttggagacttgatctttagtggattgaataactatcaaccggcattgatttttgccggcacaatcccagtgacgatttttgcacttttagcagactggttactcggattacttgagaataaactaacaccagctgcattaaagggggatgcctaaatgaaaatcaaagcgaaatttggtcttttgttatccatgatcattattttactctcaggctgctcctttccaggacttgcttctacatctaatgaagacaccgtagctatcacaggaggaatcacttctgaagctcagattcttggcgctattgtagcaggaatggtagaacattatacggacaaaaataccactgtcattaataacttagcaacaacgacaatcaatcatcaagcaatgatgaatggcgatgcgtctatctctgccgctcgttataccggaacagatttgacaacaacacttggcttagagccagaatctgatccaactgctgcctttaataccgtaaaaaaagaatttgagaaacgttaccatcagacctggtttccttcctacggctttgataacacatatgtttttctagtcagaaaagacactgcagaaaaatataatctgaaaaaagtcagtgatttaaaaggcgttgccgatcagttggttgctggtgtcgatacagcttggatcacccgtgaaggtgacgggtatgatggctttcaagaagcatatggcttttctttcaaaaacattttgcctatgcagatcggtctcgtttacgatgctgttgacaacggaaaaatggatatcgtactcgggtattcaacggatggacggatcgctagttatgacctcgtaatgttggaagatgatttgaatttctttccaccttatgatgcagctccagtagtcgatgacaaattaatcaaagacacaccagaagtagcggacgccttgaacaaacttgctgatacaatctccactgaaaaaatgcagcaactaaattatcaagttgataatgacctgttggaaccgacagtggtcgcagaacgtttcttacaagaaaataattattttgaaggagagtgacgaaatgaatgacatgaatctatttcaacaatttattgcctattttcaggaaaatggcggttatgtctttgcacagtttgttcgtcacttcctgatctctatctatggcgttttattcgctgcaatcgttggtattccactaggaatctggatttctaaaaagatgcgtatggccgattgggtgatccgcatcgccaatatcatccaaacgatcccttcgctagcaatgatctcgattttgatgattggaatgggattaggtgtcaatgtcgttattctgacgatttttctctactcgctcttaccgatcatcaaaaacacctataccggcatgcgccaggtagaccgtaatacactagatgttggtaaaggaatgggcatgacaagttggcaacgactgtatatgatcgaattgcctttatccgtctccgtgatcatggcaggtattcgtaatgcattagtcgttgcaattggaatcactgccattggcgccttcgtaggtgctggtggcctaggtgatatcatcatccgtgggacaaatgcaaccaatggcgcttcaatcattcttgccggagctttacccactgcattgatggcaatcatcaccgacttaggcttaggctttattgaacgtcggttagatccagcaagccgctcgtcgaaataaaggccatttcttagcgcttttataaatatagaaaacaagcatccttacatacaagaaggatgcttgtttttctatatttattaactaattcactcaaagcaggtgaatgcgcttctcgattttccctgagatgatcgggaatcacgcatcatatcctagaggtggttgtttcaaggctcgatccatacaaatggattggcgcccatcgttttgcttgagggacgactggtatgccatcattccatacttgatactgatatggggtcgttttttctcgaacactgctctgatcgctactccaaagatcattctgaagtttggtcgcttttaagttgtacgcttcgtcttccccctactttcttttgggactttttttccgatgaaccccatgccgttcgggtccattcctgataaacacaagacacattcttcagaatctgtctcataataagctgtaaattcatgcccctgccaaaaatagctcttctccatttgctgaatgtctgtaagcatgacaaattctgaagaaatgagactggactctgctgtaaactgaataatctcccacgttcctatgaggtcctctttcatagggatttcaggaattgatttcgcataactaattgctgatatgaccggccaaccactatctaaccaataaatttttctgacatctaaaaagaaatcatcactaaaaggttgtctccgtgcatgatgaataataaataattcattatctgaacgtttgaatatagaattgtggccaggtgcatagactgcagactgttcttcgaattgataactccctagtaatttaacaccaattttctccggtaccgcctcttgttccgacagagacaggccattccaatccgtatagggaccggtaatctctttcgctcttgcaacccggatattataggtttcattcaaagaatcaaaagagacaaataagtaatacatatccgtttctggatgataataaacaaaaggaccctcaatcgcagtatcaacagaagcaggtcgttgcgctattttttttccgtatcccttctcggctaactttccagtgctttgatctataggtgcaatataaatcccgccaaaaaatgatccgtagatcagccaatggtgtcccatacgatctagagcaagatttgcgtcaatggcattatgatcggcgatgcctcgatgcgttttcacaacttctccttgatctacccaaggtcccaaaggatgcggtgctgttccaagaccaataaatgaagtggtactgccaaatgtagaagcggaatagtacattcgatattccccttggtactctatcacttcaggtgcccacaacccttctgcttgactccattctcttgcagattgtggcaattgaggaaaggcctgcttttcaaactgccagtgtatgagatccaatgatgtccggatcggtattcctgccgttttaggttgttgcgtatctgttgaaaataagtaataaacgctgtctcgttcaatgatcgttggatcatgaacaccatttttccagttcatagattcttcctctcagtaatcgattcactttagtttgacttcagtgaacgaaagcagaatcgattcttttctatatttatttagttctttcttacttattacgccactttcattaaaaacaatctatctgctcttgatctttgctacctccaagattaccccaggctagagtttctataactgcttatggcgtaacaaacaggacagtcattgaatgctctgccctgtttgtgcccacattcctgcaggacagtatttttttgataggtttgcccgaaatttataaaagcagccacacttagtacaggtgtgattggaccgaaatgggcaggcttcacaaatttttatacgggactgaacgacttcaagtgcagcaaggtcgttctcgatggctagctgttcttcaatcaacgcttctacatctaccgttgctgctgtttccttgacatcgcaacctttacacgtcattgaattacaccgccaaagatattgtcaatacactcatagcgggtatattgatcgttaattggctattatttgttgtgtagtcttcaaatgattggatcactacgtcttccggatgatcaaaatcattgtgtgcattcattttatcccccacaatatagcgagcttctttgattccttgaatggcagtttcaaagtcaaaactaattgcttccgagccagatactgcgaaattgcagatcgacaggtggagggtatctgcttgtttcgagaccgtgtaggtgatcgtttcacttgctgctccatgactctcgatgcgttcggcatcttgatggactttgtacaaatcaaatacatgatagcttggtgttttgaccatcttttcgccatcagtcaaaatcattgcctgcaaaacattcactgtctgggcaatgtttgccatgtgcactcgttctgcatgcttatgaaaaatgtttaaggtgatagcagctaccattgcatcacgaatcgtgttttgctgatataagaatcctggattcgttccgggttcagcagaaaaccaagttccccactcatcaacaatgatgcccacccgtttttcaggatcatattgatccatgatcgcactgtgacgcgtaatcaattcatccatatgcgcagctttttgacaggtaataatccattctgcttcatcgaatgctaacgcactaccttttttctcccacccttggggatggacataataatgtaagctcaatccatccatcagccaatgggcattcttcatcaacgtttctgtccagtggtagtcatcaacatttgctccgccagccactttgtatattttttgatcaccgtattgacgaacgtaagtctgataccgacgataaagatcagcataatattctggacgcatatttccaccgcagccccaattttcatttcctacaccgaaaaatttcatgctccaagcttcttcatgaccattttctcgacgccaatctgccattggagaaattccgttcatggtaatgtactcgacccattcagacatttcttggactgtcccactgccgacatttccattgacatatgcttcacattccagttgtttgaccaattcaaagaattcatgtgtcccaaaatgattattttcagtcacacccccccagtgagtattgacgatcgtttttcgattttcttttggtccaataccgtctttccaatggtattcatcggcaaaacagccacctggccagcgtaaaactggaatcttgatattcttcaaagcttccacaacatccgtacgcatcccatttttgtttggaataggagaatcttctcctacgtataatccttcatagatacaacggccgagatgttctgaaaagtgtccgtaaatatatttgctgatcgttgttcctgattttgtatttagaattttgattgtcatctaactcaccatctcttcagattttgttatcgctactggctctccaaatataggaaagccatctttatcccaagtgaagctctgtgccatcgcatgtcgattaggatttgccaaaggatctccagactgatttttttctggtcgtgcatgatagactaaaatatcttcaccctctaagcctgtagtaaaagaattgtgcccaggaccatattgactatttttctcagatgatttgaaaacaggctctgcttttttatgccaagaaaaaccatttaataaatcactatcttcatctgcccaaagcaaacccatcgcatagttttcatcggtagcacttcctgaataagtaatgaatatcttcccatttctagtaatcactgctggaccttcattaaccataaaaccaatcttttcccattcaaattctggaacagagagtaataactgtttcccagttagagtccaaggtgttttcatttctgacaaataaagatttgagttccctgggattcgcggatcttgttgtgcccaaacataataaagtctttcgcgatgcgaaaataccgtgccatccaaactaaaactttcaaactgggtcttaatctgccctttttcagtccagcttccttcaaatggatcatcatgttcattttcaataacaaacattcgatggtgatggacttcattgcgaatcgtaccatgatcactagcagcaaagtagatataccatttcccctgaatgaaatgaatttctggtgcccagatgagttggctcatgggaccatctttatgtgcccgccaaacattttttgtttcagctttctctaagtcattcaatgattttgctcgcctaatttcaatcgattgataacctggtactgaaccagtaaaataataatacccatcactatgatggtagacccaagggtcggctcgttcatacacaattggatttatcaaatcattcgttgtttttttcagcatatcttatccctcattctctacaataaatagcggaacaccttcttcagaaattcctgtaaatgtcatcacttgttttccttggttttcatcccaagaaaaaataaatttccctttgtattcaatatcgtcaaggatgagtagtgaatcctttgaaatattatcctctgctaacttccataatccagaaacagccccggaaacttttttatccttacttaaattgatttttagtggtgcttttgcatcatcagtaatcaacttatcaaaatggatcaatctgtattctccgctaatttgatcatccgagtaatcagctattttttcgttactgtaccttaaaggagagacaacaggccatccatcttcagtaaaatacatttggtgtactcttaccgaatgattttctccactatttggaaaacgcgtatgaaaaatcaaaaaatattctcctgttttttcatcatagtaggatgaattatgcccaggtgagatataaccggcatttgttaatccgtcatcttcttcatataaaaaatttccgatgagcttggttccaaaactctgaatgcttgtgtcatcaaattgtgtgccatattttcctttcacctcactcatcgcatttccttgaatatcttcatagggtccatctggctgctttgaacgagcaactcgaatgttgtagcccccatttgcatcaagtccaccaaaagaggtgaaaagatagtaatagccagtttcagaattatattgaatatagggtgcctcaatgcggctatgatttcctcccaaaaggtgttttccataagtattttgttctttaggcaaccctgtctcatcatccatctctaaaatgaaaataccgccagaataagaaccgtaaaccatccatagtttctcttcattgtcataaaagacgtgaggatcaatcacattggggtgaactgcggcattgtattctttcccaaattgaggtgaagttcctgaatacaaaaatgactttactttttgatagggtccttcgatagaatcagatatagcaacgcctaaaactgaaagcggggaagagccttgacaaaagcaataatacaagtaatatttaccatttttaaattgctgaatgtcacttgcccacaatgtatctgtttgagcatagtcaaactcatcagcaagttcttcacgaatattattgaaaagcgaactatcagctaccgaatttgagagttgtttccattgaatcaaatcatctgattttgcgaattgcatatgagaaccaataatataatatgtgtctttatctctaatgatcgatgggtcatgcacactaacatctgcatattctggtctttcaatcacttgctccgctcctttcagctgacaaccagcaagcagtagcatcactccagcaaggaaaaatcttttcatatagatcttaacaaccctttcttttgataacctgaaatcagacatttgctagctacataaaagaacaatggactagccacaaaaaagaaccagtgataagccaagctcaaaactgcaaaagagaggatcataactacgcacattagtgaacgaccgggcaaaactattggacttactagcgagaaagctatttttttcaaccaactgtctccactcatctctgtcgctaaaatcaaattcaaaagaaccaataagagataactcatcatgatcaagattggccattggaaataagctctcatgatactactttgctgaatgaatactaattcaacataaaaaagtaaaaaaaggattggaaaaacaatcactcgccattggaaaattttgatggagcggatatattcttgccaatatttttgaaaaatttcactgtaagagtaataaccagtgaacaggtcctgcttatttaaaagcttaagtaccgctcttgtacttgggactaagccagcaaagaaaaatccggcaataaagccaaggagccataatatattcaattcaataaaaaggatgaccacattgatccaatgcattgccttaataaacattttttcaccctttcataccagaaagcgctacggattcaataatttgcttctggaaaataataaatacgactaatactggcaacaatgaaacaacggaagctgccatgattaatggataatctgtttgaatcgcataagctgcatttaaattagcaatgactacttgtaacgtctgtttctctggactatttagataaatcaatggagctaaatagtcattccaagctcccataaaccagagaatgaattgtgcagcaattgctggacggatcaacggaaagattaactgaaaaaatgtttgtaagtatcctgcgccatcgatttttgctgcttccacgatagaatcaggaatattggaaagatactgcctcaagaaaaagatcatggtaatattcccaaacatgcctggtatgatcaatggcaacaatgtatcgacccaaccaattttcgaaaacatcataaattgtggaatcatgacagctggatatggaatcataagcgctgctaacaaaagtaaaaataaaacatccttgaaaggcatacgtaattttgcaaatgaaaaggcagcaaggctggaagtcaatgttccaatgatggtgaccgaaagagaaacaatcaccgtgtttttgatacctgagaataatgtatctagttcagacaagcgcttgtaggcatcaaatcgaactggatttggaatccattgtggaggcaactgaaaaactccagctttatcttttaatgacgtagagatcatccacaaaagtggtcccaccatgatgatagctccaagggataaaatcaaaacgatgagcatattacttagtttaatttttttcatcatttctcctcctagtccaacttgtagcttgaacgattattcatataaaattgaaatgctgtaatgccaaatactaatatagctaaaatcagtgccatactgctggcatagcccatctgccaatttttgaaggctttttgccagatataccagactacagtggcactactatattgtggtccacctgtaggtgtcatgatattgatttctgtaaaaatttgagatccaccaatgatatttgttactaccaaaaagaaagtaacaggtcgaaccatgggccaagtaatatttcggaacttttgaaacgatgaagcaccatctaactcagccgcttcataaaatgtcttaggaacactttggattgctgctaaatacagaagcatagaatagcctaatcctttccaaacagacatgataatgatagctggcttaacagtagagggattttgtaaccaattaggaccgcttatcccaaaaatagctaacacttgattgaccaatccaaaatccccgttataagcccattgccataaaatagaaattgcggccagagaagaaataactggaatataataaattgttcggaagatggtcgttcctttgatacctcgacttaatgcagatgctaacatgaaagaaagaatcaagccaatcggaattcctaacatcaaaaatacagtattgtacatcgttttataaaaatattcgtcattaaatagtttccggaaattttctaatccaacaaagttcatttgtcccaacccattccagtcagtaaatgcggcataagctgaataaactaacggaataagcgaaaataagataaacccaatgacaggaagtaggacaaataaaaaagcaacccgatgttctttagcatataaactacttttgtttgattttcttttctttatttcaacttgttccatcgaaaagccccttctcaactaatatttagggctataacagaggtgtcttaaactgacaagtactcgacctctctgtcttttgacatctgtcatagccctggtgacttattttgccgtttcttgttgctgaagtgcggcatccaatttagcttgcatcttcggttgtacttctttcacgtaatctgcagcagtttggtcgccatctagtaccggttgaatattgatgaaaaactcatcgtaccactcagcattataagtagttgctgctggcatagctcgaccatagtcttgaacaatatccaagaattcttgcttatttgtagggacactttcggtatctgatgcccattcttctgccatatcgatcaagttaggaatttgaatctgtgcatccaccaattgttgttgaccatcttctgaagcacttaagtattctacaagcttcactgcttcatctggataatctgtcttactcgctacaccaatccccaaagaaccgacgtatgttgctgatttaccagttgatcccgctggccatgggatcaaatcatattcgaaatctaatcctgcataggtgctcatatcccatggaccgacagggaagaatgcaatttcgccattcatccagcgttgatacgtatccaaggtttgtgcatcagagatcgacggtgttagttcatgaacgttttgtaagtcggcaaaccattgcaatgcttccgcaaattctggtgtatccacagtcactgtatctttgtcttcattgatccaatctccaccattgctccatacaaatgcttgaagactccaattgacattaaagccagttgcccattgatccatttttccatcgccatctttatcttttgtcagctgtttcgaaacattgacaaaatcatcccatgtatacggagtgtctgtgtcgggtaagtcaattccagcctctttgaacatatccttgttgtatcccaaagcaaatggaccgacatctttaggtagtccgtaaagtgcaccttcacctaccttctcaccatcgtagcggtaactattcactccatattcccaaatatttgacaaatcaaagtcggaattttcgatttgatcggttatatcaagtaaaacaccgttatctacataagccattaaattcccttgttctacataaaaaacatcaggcatattaccacctgaaattgcggcttgcagttttgtagcatactgatcggcatctgttgcaattattttaacgcttacgtcatttgcttcttcaaattgtttaatagctgtttcataggctttcttttcatcttcaccgccacggaacataaaagtgatttccttttttccgttgtcattgttcgcattaccaccactatttccacatgctcctaagatcaaaccgctcaaacccaataatgcgccagaaaaaagcaactttttgattttcatttttttcatcctttcagatttaacctctaaattatttgtaatcgatttatgaagtgcgtcaaaaacttcctctatagataagtatgataagtgtcactttctacaaagatttttgaggaaataatacctatgtgattttgctacaaactgtttttactgttcttcctcctcatttaaaataattcatttaaaacaaatgataaaagcagcgtttgcaaacactttcaatttacaactaaataataactttatttgtaatcgctgtcaacaatattttaattaaataaaactaaataatatacctattaattaatatttatattaataaaaactactataaataatcctatttacacaaattaacaaatatgttaacattcaagtaaatcatttataactataatgggggtgaaatgatgcaattagaaatcaatcaagaagcattgcccgtctatgaggcgttagctagtaatgtacggatcaaaatcattcaactacttgcaagaaacaaaatgaatgtgaaagaaatcgcacaagaattaggattaagcagtgctatcgtcacgatgcatatcaaaaaactagaagaagcaaaaattatcaagacagaacgtgtcggtcagcgaaagatatctagtctgagagtcgatcatatcgatatcaattttccagaaaaaatctttaatgcattcgatacgagagaaacgtcaattccaattggtcattatacaaattattcggttgaacccacttgtggattagccacgcttgctggttttatcggtccagtagatgaacctaaattttttatggaccccaatcgaatggatgctcgcatcctctggtttacgaaagggtttgttgagtaccagtcacctaattttctttctctagatgagaaactagagatgatggagatttccatggagatttcttctgaattccctttttctaataataattggccgtctgacattacctttagcttaaatggcatcgagcttggaacttggacaagtcccggtgacttcgccgatattcgcggcaagtatacgccagattggtatcctgataacttaaatcaatatgggttattgaagacgattcgaatcatggatcatgggacttatatagaaggagaacctttatcagacgtcacgatcaaggatattcctgcttatgaagatacttggcatttaagagtcgaggtaaaagaagaggctgaaaatatgggcggttgtacattgtttggcaaagggtttggaaattacgatcaagacatcaaaatcaaaatgttttacagctaaacgtttttaggaatcacaggcacactctctcatcatttttgatgtgcggtaaaagattccttcgctgaaaataagacaaaaaagaccatctcgctcgatattagagttagatagtcttttttgattataaaacttaatctatttcttcaaatgataactgtaagttcctacgacaatgttttcacgccatgataaacggaatcttagacgcagacttgtttggttgtgtaaaatattttgccagcgacgacgtggcacgaactgtggaatgataactgtcgtcgtataattgtgtttcgttgcgtttttgctgactagatctacataacgaatgattggattttcaattgaacgataagaagaatgcactacagaaaaacggacatccgggaaattttgtttgaactcttgttcgatttctttttccttcttgacatcttcatctaaagatacgtgcattgcaactacataatctccgatggattgtgcataattcaaagccccgatatttacacgggtcacatttcctactaatacaataacggtattgccatcatatttgtggagtgccacttctttttccaaacgtagctgctcagcgactttcttataatgatcatggatcttataaaagacaaacagtaggattggcatgatgataaagaatggccagatgtcacctagacgaaaaacaaacaagatcgcaatgatcgcaaaagaaatcaacgctccgacgatgttggccaatgatttcaagaaccatcctttaccagctttcttccatcgaactaccattcctgtttgtgagagcgcaaagggaatgaacacgccaatcgaataaagtggaatcaaccgttccgtcgatccttggaaaatgaacaatagaacgatcgaacctgctgccagcgtaatgatcccattagaataacccaagcggtctccccgatcttgatacatatgaggcatatacttatctttcgctaagttataggctaacactgggaatgcggagaatccagtattcgctgcaactgctaaaatcaaagccgttgcgaactgcagaacgtaatacatgaatccgtgaccgaagatcgcagctccgatttgcgaaaggaccgttacttctgcttctggaacgattccataccaatagttgatgaatgtaatccccacaaagaagaaacctaggatcgcagccatgatcgtcaatgttgcagctgcattttttgctcgcggctttttgaaaaacggtacggcattactgattgcttctacccctgtcaatgaagaagaaccagaagaaaaagcgcgtaagatcaatgcgacagaaacccctggcacaacagcacctggtaaggctgtggcatttaatggctgtaccccagtgataatattaaataatcctacaagaatcaagatcgtgatcacagcgataaaggtgtatacaggaaccatcaagaaactcgcagattctcgtagcccccgtaagttcatcatcatgatcagtaaaacaatagtgatcgagatacccacctgatgcccatatagagcgggtacggcagaagtaatcgcttctgccccagccgataccgaaacggcaacagtcagcatgtagtcgatcaataaagagccgccagcaatcaaacctgcattcttgcccaaattctcactactaacgacatacgccccaccaccatgagggtacgcatgaatgatttgacgataggataaggtcaatgaaatcaacaagataataacgaatgcggcgatcggtagtgaataccagatagcagcagctgacaaagcaactaagacaacaacgatttgttcggtcccataagcaatcgatgacaatgcatccgaagataacaaagccaacgcggctttccttgtcaatttttgttcatcattctccgcggatttcaatggacgtccgaccaacaaacgtttcaaatattccactttcttacactccttttttcatgaaaaagatcataattgcacatacaaaatttctttgataattactgaattaacaagactgtatgctactcctgaaaccgacaaaagtcaatgaaaatggcatgaaaaatttgaacaaactccctcttctttttatcagaattcgcaagaagattcaagaaaagcagatagaacatcgtgccctatctgctcttgattttttaatggaaaaaatgactctttttcgagacattatttagtttcttagttacatctgttagataaggataagcccatgttcctatgatgccaaatacaataaacaacagtgacaaaataatcaactgaggaatggcgtttggccaatagatcccgccggctgattcccttaacagattgactgcatgggtgaatggtaacagcggattaataaattggaaaaatttaccagagacttggatcggataatttccgcccccaccagaaatcgatagaacaaggataatgatcgcgatccctttcccgacattgccaaacagtccggctaagacgtagacgatcatcataaatgctagtccaacgagtaatgcgaacaagacgctgtataccggattatgaacatctactcctaataagaatatatttcctagtgtaacgatcaagctttgcgcaatggccatagttaggaaagtcagcattcgagcaacgaatgtttctcgttgcgtaaagcgttctttatctttcttctctaaatgatactctgttgtagccacacttgacaacaataacgccccgacccataaacacaacgctgtatagaatggagtgctggcagaaccattgttggcaatcggatagatgtcatttgtttgcaattcaactggttgtttgaagaaatccgcttctttagttgcatcaagcttcaacaacttgatgatctcgcctagatcaacttcactttcacctttgcgaatcgcattggctgccttatgaatgcctgttttgatatttggccaatcattattgatcaaatcaactgccgcattcaatgctttttctacatctggcagtttctcatcaaccatgttcatggtcgaagtgatttcagctttgatggttggccagtcattttgtaagaaaccagccgcaatccctaacttatcttcaacgattggcagttcattgttgtaaagatcggcccctttgttgatggctgcgacgatctcatccatgtgaccattgagcatcgtattggcatcatgcaactcttgcttaatagcaggtaattctttttgatacttttctaagatactgatagcattgctgaccacatttttggttgatgccaataaagacttgaagtcaatggcttgcgcttttttcaatacatcttgagctgtagtgatggtggtgatcaatttagtcaacacattgtcgatggtatcggtaatattcgtcacattaatgccttttaaaagatccgtaacattttgtgcagcagtgttgacttcagttaaatagtcggtaatagcctctgtattcccatttttgaccaattcgcttaaatgatctagccgcgaagaaagatcccccaagagactttttgcattcgtcaattgattaatgatccctgataaatcggatgtgttgcctgagttttgaagattcgttaagaaagtaatcaagccatccagcgctgcttgttgccgttgaatattttgttggaaatcactgatgaccttttggatgttttcccgttcttggtcggtcaattgattgtcagcaattgcttgtttgattgtattcgttaagctaactgtcgtggtagcgacttgactgatggaatcaatcgttacttgaacactattagaaatacttggtagcgcatcttgtaactgttgggcaccttctttcgtcgctgaggcaaagtctgttgcttggtcccctaattgttggatttctggcaatgcggtttgtacttgatcaatgatttgcagtccttgtttagctgtatcaataccatctgtcattgtactagcaatagaatcaaaatcatcatcgatcatttttaattgcttgccggcattttggatctcagggatctttttctgcaatgtcagaatgacactagcttgtttttttaattctggcagcttgtcattcaatgcgatcagtttatcccccatttcatcgacctgaggaatataatccgtaaattcttcggctttggcgattttgtctttgatttccgggaacttgtcatgcaaatcaacaatttgcttcgtgtaactatcaatggtgtcaagattgccatcggtctctaaaatcatatttttgactttattgatactaactagatttgaatcaatatcatacccgatttcgttgaacactttgactaatgtagaactagcagtttcaataaagttctttgagatctgttcttggagactgcttgctcccttgtcagtaatcttaggtgcgatagcattgattttttggttactgtagtattcaattttcggtttaacgatcgtaccgctggtaaaactgaccagatcttttgaaaaatcagcaggcaagtaaattcccgcgtaatatttacctgatttgaccccttccactaattcttttttagaatctagaaaatgccaacctaactgtttattttcatgtaaagagtcgatcacttcattcccaatcgatagctctttcccttggaattctgcgcctttatccgcgctgtaaaccgcaatgggcagttcactagtgtttccatatggatcccataatgctttgatattgaaccacgcataaagcgagggcaaaatcatcaaagcaatgatcaaaaaagcggaaatcggattactaaaaattcgtttccagtctaatttgtataaataaaacacgtttttgattttgttcatgttctttcccccacttttcttcgtcgaaggataatttaccacgttttttgtacgccgccaatgggaatgattcccttgatatcagccttttgacaaaaagtaccatttgtcaaaatgaaacccctttacttttcgcgtaatttcccttattgttaatcttttctttaactttaacacgactgcttttggcagacgaacaatttgtttgctaaaagcaatcataaaaaaagcaccattgaccgtttcccttgatacgatcaatggtgcctgttctagtttgtcaactgctcagtggccaatagttgataaacgtactcaagagaagtcgtttcggcataaaggttcaaacctgctttttcatcagctgaaaaatgatgagtgaaactttgatccggtatcaacaccacttgaattcctgcccgagttgccgcggtagctcctggcaatgagtcttccataactaaagctgattcagaggttcgtgctgcttttttcaatgtcagcaaatagggagccggatctggtttgtgtgctgggacatcgtcaccaaatgtcttgaaatcaaatgcattctgcaattcaaaatgatccagtagtttttcacctcgaaaagccatcgaagaagtggctaatgctgtctttaaccctttttctcgtgccagagccaatgtctcacgagcaaatggttttggctgcaagtttccattgagcaattggtcttcaatgtacccttctcgttcttgccgaaattcctccacacgttgaagaccaccaacttttttcgctagtaaggttgctgtctgttgccaactttgcccacgccaagcaacgatatctgctgatgtgatcggtagatggtacttttcaaaaagtgccaaccagccttcatgatagactctttccgtatctagcagcaatccgtccaaatcaaaaatcaataattctttcatagactctttactccttctctccttcatactcaagcagtttcaatataagtattttaatcaagacatttgacgattcttttcggcagctgcatgaacagccttcatcaccgcagcacgaaagccattttcttccagtgtttttacggcttgaatggtcgtaccaccaggagaactgacattgtctttcaatacaccaggatgttctttggtctccagcaccatcttcgcagcgcctaaaactgcctgagcagcaaattcataggccatttggcgggtcattccttcggcgactgcgccatcggccaatgcttcaatgaacagataggtatatgctggggaagaaccgctgaccccaatcacagcatcgatcatggattcaggcacttgagctgcttttcccatgctttcaaataatttttggatttctgcagcttcctctacggtcacatgcggattgttactgatagacgtcatcccttctccgactagtgccggagtattcggcatcactcgaacgatcttgcgctgacccaaaacttcttccatctgcgcaatcgtaacgcctgctgcgatcgatacaactaactgttgttcatttaattgcgcttttagatcctccaataatttaggaaacacaaacggtttgacagctaaaatcaaaatggaagcagctgcggcttcagaaagttctaatgtaggggtgatccctaaatcttgttccaactgtttaagtgtcggttcataccgatgattgtagactaaaatttcctttggttgatatagttccgattggatcaatcctttgataattgcttttgccatatttccggccccgataaaggcgatggttttcataacactcactccttctaacatttatgatcctatgttcgctgtttcttgtaaaaaaagcctaatcaagagattaggcttcaaactcgatcacataaggatgcaatgctgtattatagatgccctctgtatattctaccacttctccatgcagatcataagagcgacggacgcgctttaaagcggaaatctctggtgtgatcagaaatttttgttgttcctcattcaacgtcagtcctgcaaatgaatcttcaaaggtatcgatcaccatccgatgttcatctaaaatacggtacagtgatttttcttccaattcttccatggcaaggccttttaacaatttgggcaaatgatattcataataaataaatggttgatggtcaaaatagtacatgcgccgcaaacgcatgacttctctgcccatcaaagcagaagctggatgatcttctgcgagctcgactaggttaaaatcaagatttttcttggtatattctttgccggttttttctaataactggctgaaagttgtccctttagacaacttgttataaggtcgattacttaaaaccgtggtcccgcgtccactgcgcttttcgacatattcatctgctgctaatagctcgattgctttgcgtaccgtgattttactcacattgaaggctgcttctaattcggtttctgtcggtagaaaagaaccaacaggatagtgtccggacatgatgtcttctttgattttatctgccacatcacgatataaaatatgtttacgcttcatttctttcctcgcctttccagtcattgattctctctcaaaaagaggacttgcacgttactcatcaaaacccggcacttcttcggctgctgcttcgatcagcaccttccgaggcttactgccttctgaaggacctacgaccccttggtcttccaattcgtcaacaagacgggctgcccgattgtagccaatccgaaagcggcgttgtaataaagagacacttgccgtctgcatttcgatcaccaatgctttggcatcatcaaatagttcatcctgtggttgaccactgctggtacttgccgtatcttcttcggtaaccatcattttctcttcgtaattcgctccctgctgctcggtaacaaacgacacgacccgttctacttcgtggtctgagataaaggctccttgcacccggattggtttattctcacccataggcaagtacaacatatcgcctcgtccaagaagtttttccgcgccgttgctgtcaatgattgtccgggaatcgaccccgctggaaacggcgaacgccattcttgaaggtacgttggctttgatgattcctgtgatgacatccacactaggacgttgtgtcgccaagatcatatggatccctgcagcccgcgccatttgagctagacgaatgatcgcatcttctacttcattacttgcgaccatcatcaagtcagccaattcatcaacaatgacaacgatgaatggcaagattggtcggttttcaccatcttctaaatttttattgatcactagttcattgtatcctgtgatatttctaactcctgtcgcagcgaacttctcataccgttcttccatctctttaaccactttttgcaacgcttgcgctgctttccgagggttcgtcactaccggagtcaatagatgaggaatgccattatagacattcaattcaaccattttcggatcgatcatcatcaatttgacttcgtggggttttgcccgcatcaaaatacttgtgatgataccgttgattgcaacggatttcccactaccagtagatcctgcaatcagtaagtgaggcattttcgttagatcggccgtttggacacggccagaaatatctctacccaaagggacttctaacaacttatcgggatgatccggctgtgcttcaatcacctctcggaaggaaaccatgctgacagcactgttaggcacctcgatcccaatcagtgattttccaggaatcggtgcttccatccgtacatctttagcagctagtgccagtgcgatgtcatctgttaagccaacgattttgctgactttgactccgactgctggctgtacttcaaatttagttactgctggtcctaaactagcttttaccaccttggcatcgacgccaaagctttggaaagtcttttctaaaacaccaatgttttgttcgatttttttgtactcgctgctttgatcggttgcagggatcgagtccaacaattcagaggacggcaactcatagtcgcgattttctgcttcttcggaaatttcaaattccaatacttcgccatcatcttccatttcttcaacgctttcttttttctcctgtgccgaagccggagaggatgatgcagctggcggtgttttgggcaattcttgaaaatgatcgattggcacaaaacttaactgctctggttcgatttccgacaaatctggttctgattgggctgctcgctcttcttccgtgaagggacggacttgattcttttctttgatctcagccaaaacagcagaacgctctgcttcttttttcgctgctttttcagcagctttttgcgcttttcgttcttcgcgggctgcttgtttttcaggtgatccttccaaccattgctgaaccttttcaccagcgtgctgcagatgctccagcaactcgtgactgctcatcttactgaacaaaaagcccccgatcatgatcatcaagacagctaaaatgtaactgccgatctgggatacaaggaaataggttccgcgatagaagaatgcgccgaccatgcctcctcccacattttgtgaaacttgactgcggcgaatatcatccagcaatgtcgaccaagtcgtctgcaagacattcggcgattcattcatgacattattgaataaatgcgcatgcaggatcactaagatccccaaatagatcagcacacagccaaccactcgacgtaaactcgtaaaacgagcttctgtggtcttgattgccaaccatcccccgtaaacggccaatgcgagacaaagcacttgatacgtattgcctccaatgatacgaaagccgttagcgatcagcgttcctaaaaagcctaagtggaaaaaaccaaagatcgaaaacaagatgaaaagcaagccgatgccgactagaatcagtttctcttgttgtttttgttgtttttttgttttgcgtttcttcgcgcgttttttttgcgccattcttatccctcttttcgtctctacctattataacgaaaaaagaaggcgaacaaaagttttcctgtcagaaagtttactactagaaataaaagatcccactaatgaaaaaaagaccgctccataaatccatcaaacaaagacgatctaaaggagaaaagacaagaaatgcttcttaaaaatctctttagtaagactacagttaagctaccttgcacctgttcatcaatcgcttcatgccaggtagctactgtgatcgtttttgttgtggcttatgtcgccgtcaatcgtttttcatttattcaggagaaacatcttctccaaaccatttttcggaaatctcagcaaatgtgccattttcttgcagtttctttaatccctcattgattttatccgccaatgcttgatcgtcttttcgtactcctactgcaaaattttcggctttgaagggactttcaataacattgtaatcgtccgcttttttcgtctgagtcaaatagtactccgcgtagacccgatcgatcaaaagaccatcgatccgaccattttccaaatcgataaacgcttcgttgaaactagcatataaagttgcttcattatcggcgacaatgtctttcaatacttttggttgattgttgaaggtatcatagccagaggatccttcttgtgcccctagaactttgtctttcattgcatcaaatgaagtgatgttgctgtctttggcagttactagaacctgcttgttttccatataagtatcgctgaataatactttcttttcccgggcttctgtttttgtgtagccattccaaatcatatcgattgtaccattatctaattctgtttctttcatcgaccagtcgattgcttggaatttgactttggttcctgttaaatcaaaaacggcttttgctaggtcaacatcgaaaccaacgatgtccccttggtcatcttgaaagcccatcggtacaaaggtatcgtccaacccaacgatgacttcctctttgtctgcagcactttctgctttctcgctactattgccacatgcagcaaaaagtaataagctggctccggctaacaacgttaatccaatttttttcatttttcttcctccttagttcccttcaacttctaataattgatcggcaatattttttgcaaaaaccaaatcatgggtaaccacgatctgagtaacgccctcttttttcaaatctaagatcagtttttcgacttgctggcgcagacctggatctaatgcactcgtaggttcatcatacgccaatactttcggatccatcgccatcgcccgcgcaatcgctacccgttggcgttgccctcctgaaagttggtaaggatattgcgttaaaagttcagataatcccaactgtttagccaaagcaacagctttttcggtatagctagctttgtcttgtttcaataccatttttggtgccagtgtgatgttatcgaataccgacaaatgcggaaatagctgaaagtcttgaaaaacgacaccgactacttgttcttgttttttcgtatccgtgggatcaaaaggttgtccatctagtaaaaaagttcctgaatcgatggtctccaatccagccagggtacgcagcagggttgtttttccaccgccagaaggtccgactaccgctaggatgctgccttcttcaattgtcaggtctaagcgatcgataacctgcttgtcgccaaatgcttttgatacttgtttcagttctaacatgttcctacgcctcctaacggtaataatcgagttttgtttctaactgtttcaaaatcagtgtaaaaataccagtcatcattaagtaaatcagcgcaacgcccagtaatggtaccaacgtgctgtctcgttccattgcgattttaccgatacgcataacatccgacaaacctaaaatatagacaagcgaagtatcttttactaaattgatcacttcgttccctactgaaggaagcgtgatcttgactacttgcggaatgataatcttgcgaatcgtctgtaaaggtgctaggcgcagaacttttgctgcttcgtattgccctgcagggattgattggatccctccccgaaaaatctcggcataataagcggcataattgataataaaggcaatcagtgctgcttcaaaccgatcaaagacaatgttcaggatcggcagaccataaaacacaaagatcagttgtaacagtaaaggcgttcctcgcatcagccagacatacacttgcacgattgctttcaagatccgtagtcgactagcaagaataaaagccaagatgatccctaatggaatcgatcctattaacgttaatccaaacaatttgattgtgatccctgccccagaaagcagttgcggcatcacacttactaaataatcgatcatttctttttgcctccttgattttgcggcaatgactgcttgcttgatttacaatcaccaagcaccatcttgccgtgtttccacttgattaaaatcattaaaatgaaagacgcccaacaaaaaacgccctccggcctaatgccagaggacgtttaatacgtggttccacctcaatttgtttttccttcacagaaaaaacctcatgcagtcagttgatggatttgctgataccgccattaaataaaaaaagtcctttagccattacagctaaaggacgttatcaacgcggttccacctttgtttatcagtgcttcacagcaactgatctcagaaagtcatcaaacaatgactgctgctataacgggcactcccggtctttcctactcgattcagaaaaacgactccaagatgtggttcacaagtccttgttgtctcttctcaccagccagagactctcttaaaacgaagaaaccttgctactcttcttttcgatgtctgtttcattaagttgtttattactttatacgcaaactgaaaaaaagtcaaatactttttttcagttttttgatcggaaaattcattttcacaaaataagagacgaatagaaacattctatccgccctaaatgcattttagacttcgtaatgatcagtacaactttgtattccctctatggtactttcagttgaacatgatagcgatagcggtccccacgataataaatttcagcatattcaactaagcgatttttgtggtctttagtcagacgctcgacatataaaagtggtgtattcatttcaatttttaataagttggagagttcttcatcagacacaactgactcaatggtttcttgtgctgttgttactataaaaccttgactacgcataatttgataaagtgatgcatgtttgtcagcaagatctttttcttttagatcaatgtatgatggacaatatactcgttgaaatccaatacattgatcatccacgtagcgaaggcgttcgtgtttgctgacctccgctccttttggcaaatctaacttactacacaacacctcatttgcttccaaagatgtatttaaagaaattaactctgaatgattggactgcagtttattttcttccgaaaaacttagaagggtttgtaattgcagtaattctttcgtactgagtacaattgtacctacaccatgaattcttttgataaaaccttcatctactaaaagttgcaaggcatgacgaactgtaatacggcttactccgtatttttcttgaagttccggttcagtcaaaaaaggttgcccaactggatattttccttcattgatttcttttttcagctcttcataaatcgagagatattttacctttggacttatcattttcattcaccacatttgctaaagattcagccaaactagttaaatcgtagctattcgctgattgaacatcacgaaacagtggcgtaaaacgttcatcatctggatcaatcaatgccccaaccatggatcctacaattgtcgcaatcgtatcagtgtcgtatcctacattcactgcatctatgatcgcattaaaaggatcttgtttgtttagggcgataattccaaacgcacacggaactgcttctgagatatggagcccactaccgatgatttgagctagtcgctgtagtttttcttcatgggtaccagattcattaactatagtatacgctagtttcatgcgttcaacaacgctgggaccgccaacttctcgggaataaactttgcctaattcttctccccgacaagcgccataaatccctattgctactaattggtccacagttgcatggtcacacaaagaggctgacactgctgccgcaactgcagctgctccagaaatagccagtgcattatcatgagttacttgcgttataatcaacgcttcttgaatagctttttcaatatctcctgggtttaatatccctgcaggtgcgattttcattgcagctccgttcgtagcttttgaagcatagtctacagccatagctcccggtaaaggcgccattttttgatcaggatttttatacattgcaatcgcacttcgcgtagttggacctgcaaatcgatcgaagtaccatgtattttctgaccatttcaagatggctgtcttcactgtttcagaatcaattactcctttattttctataatactgtgacacaacgtataaatttgcgaaaaatcatctgtgacttgtccagcttcattccctaatgcaaaagcaccttcctctggttttaaaaaggtagaaactttgccattgaactttgttctaatttgatcaaaagtaagattttctgttgcagctcccatagcatctgcaatagctgctgcccccaatgtaccttgaatttttatttgtaaactcatataaactatctccattctcttattctttatttcatttcagcttctgggtcttttatacctaaaatgattgttaggatcattccaccaaaaaatgcaatcaccaaacccacaatgtacgcccaaagtgtaggacccgcaaaagctggaatggtggttaatcctccaaatacaaaggcgttaccaataacattaaatgcacccataaaagctccacccattgcagcaccaagacagccagcaatcaacggtgttttaaattttactcctagaccgtaaatagcaggctctacaattccagataaaaagacagaagtaattgcagtcaaagaaaagttccttaatttggtattttttgatcgtaagaaaactgcaaatgctgctcctgccatcccaaagtttgcagttgcgccatacgcaatgaatggtgagtgacctgtgctagcgatttccggaataataaccatggtatttggtgcccaatgaacaccaaacatgatcaaaatattccaaatgccacctgtaattgcccctgtaataatctgattgattcctgctaaataatttacaaatccagcaataccaatactaatatagttacctaagggaccaaaaatactggcagttacaggcactaacacaaacaaaagaacggttggtatcaaaatcatatgcaaactattcggaattgtttttttcatgaaatgttccattttcgattgtacccatgttgtaaaaattgcgggcagaatctgcgaagtgtagttaaagactggaactggtaaaccaaagaaagaaatcgtattgcccccgtccccttggatcaaattaataaagtctggcataatcaatgcaccagcgactgcaatggcaatataaggactcgttttaaatcggtttgctgcagttaccgaaactagtaacggtaagaagtagaagacagatgttgcagcaagtgtcaacatcaaatttgtcgagctatccgtagataaaattccgacctcatttgcaagaattgtaaatcctcgaagaagacccgatccggctaataaaggtaataaaggcgagaaaatactcactacgagttgaacaaactcatttattaagctcttttttgtctgaactttagaatttttttcattggtcgtctcattattttctctattcaatacttttaagaagtcttcataaacttcccctacattcgttccaataattatttgatacccggaatctttattgactactcctgtcacaccatccaataattctattttttcgctttgaactaactcacgtttcttcagacttgggcgtaatcttgttgcacagtgagtaattgactcaatattttctgttccgcctagatactctagaatctgctgggctaacctttcatttttcatgataaatcccctttctataatgaattagcaagtcgttatgacgtcatatcaacatctaaaatatacccctaacgcccttgagtgtaaacgattacaaaagaaatatatccaaagatttatttatcactcataaatctgctttcaagatttagcttttttgaacacgttctattgaaactattttttaacactttagttaaaaagaggatagaaagaaactccctgtgatctctgttctaagacgtcttattctaatcatattataatctgttttaatcaaagtaaacattaactataaaactttgaactgtaagaagatgtataaagtccaccaaagtagtttcatttagaaaaatttatcaagtatatctattattcaactatctcatttctaattttattataaattaatgagtttgtatcagacacccaaggaagactctctcgtcaaatctaaaaataaaaggatgaatttgaaaatttattgagttaccctttattagatgatacactttttaaaaaggagttttagcaatgaaaaaaatctgttggattttttctatcaatgttcggggtatggcaccattcggttacagcacaacaatgaatcttagacaagcaaaatcatttcaagaaaaaatcaagacactcttaccagcagaaattgagactcaatttattagttatgatatttcaagtaatgatattcctgctgcagatttacttgtttttaatgatatggattcaaactatctaagcgaagaaataaaaaaacaaggcattgctgtttcttttaaagatatggtttccggaaatactacagttatcagaaaaacaattctgaacgccctaaatttaggcggaatttgaacagtttttctgcttgtaacaataacgacacccctctcatacttatgaatatgagaagaggtgtcgttatgtattatttatctttcgtcctatctaaaataaagcaagtaataattgatctaagcgcctagataggtctctactaataagaacactgattatttgatatcttatcaatattcataacggggagaatgaagagcataaaactagatagctttttctttattctggaatggtaacagtttttttgacaaattttataaggtgcagaacttctttccgtatgctattccgattgtccttgacaatgagcctcctcggatgtgacgatcttcggcaggggctaacagttaaagttagactgcctcgctagcgttagcacatccgagctcattatcaaggattcgctgcgccaatctctggttacggtaaccaaccggtgtctcgtagccaagtgtaccgtgcaaccgaaggtggttccaccaattgacatagtcaaataactccaaatccaattgttgtaaggtttcaaatgtgtattgatagacaaattctactttcaacgacttataagttgattcagctacggcattatcaaaaggacagcctttatgacttaatgatcgattgatgtcaaaagttgttaataattcatcaatagcttggttatcaaactcttttccacgatcagtatgaaaaatctcaacctctgtcagaggttgtttgatacggctaaatgctttttttactagaacggcatctttatgttctccacaagaatagccgagaatttctcgattgaacagatccaaaatgaaacagacataattccattttttcccgactcgtacataagtcaagtctgttacgatcgcttctaatgggttgtctcttaagaatttacgattcaatacgtttgtcgttttggcttcattgcaaatagaatgatgtactttaaaataagcaacagtatagctcgattttaatcctctatttttcatgattctactaatttttcgtcggctgatctgaatgcctcgttttgataaggctttttttatttttcttgagccgtaggcctttcggctgcggataaattcttcagcgactacttcttcaagttctgattcatctttctttggttttgattgataataataggactgacgtgatagacctaatattctgcacatcgctgatatagggtaaagatgcttattcgcatcgattacttgtctcttcgtccgaatatcagcgctgcttgctttaaaatatcattttccatttctaattgctggtttcttttacgtagttctaacaattctttttgttcaggcgtaagattatctttttctttgaatgaaccactcgttttagattgctttacccatttgtcaaatgctgaagccgttagttcatattctcgaatgatttctacacgtggctttccagctaagtaaagattgacgatttgttgcttgaattcttgtgaaaaagttcttcgtgttctcttagacataaaaattcctcctggtatgttttcttctagtctacacaccttaatttttctgtctagttaattgtagcctatccattcgttagttatcgttctatctgcttttaatccaaacgtaacactttcaaaaaattacatttattgtttttcgaactatattgtatgcatttcttcaatatcaagtaatgacgtacgattatgttgttctatttctgatgctcccccctataacagatgttactgcacttaaatctagtatagcaactgaaggtttaacaccaatcctaaattttttccataactcttctttgattgtatggtaagcctaccatgatgctccacaatcaaaaaaatagtatctttttgcactatatatgtatcaaatcactatgttatagtttacttaaggagggagaaaatgaaaaagatagtactaaaaaataaaaaactgcttgttacgcatgtgattatttgcgcaatcgctgcgcttattcaggttggcgttgcacttgtttatagccttatcacagaagttgctatgtcaggaaatatacaaaagcttatggttgttggcttattcgccttcttttatatcttattaaacaccatgagcgactttgtccccagacgcagtaaatctatcttggtccactcaataacggatcagctgagagtcggcctctcgcaaaagatagtccgaatggatccagaaaagtttttaaaaagcgaaaaaaattattacctttcaaagctagccaatgaaataaaagttattgagcaagaatttttgaaacctggatttggattggttttaagcatctttacctttattttttcacttcttttctctttaagacttagtgcttccttttcaattgtcatgctattgctagcctttagccccttgttagctccttattttgccaaaaaaattcttggaactcgtcgtaaagcggcggtcgaggcacaagatcatacactcagtttatttgaacaacttctttctggctatctgacactaagagtaggcagaggattcccgaaatatgctacacgtttttctgaaagtagcgagcgactgaaaaagcaaaatattcattttgaatcgttacaaggacttacctacgcgatttcttttggtcttggcgaccttgcctactctggaacgtggattattggtggtttttttgttgcagcaaaaataataacccttcctaacctcattgctatgactaccttaatgagtacgattgccggtccattggaatatttcagcacctcgattaccgatattttatccagtaagaaagtcgctgatgatcttatatcttttatcgatagtacagatgatgatgaaatgactcgatcaatcattcttgaaagtcccatcacaactttgtcgattgctaacttaagctatagttatggtacccgtacattaatcaatgaattaagctatcaatttgaaagagggaaaaagtatgcaattacaggtgcgagtggcagcggtaaatccacgctattgaatattttagcaggcatttattctgtcggtgaccgtcaactatttatcaatgaacaagagatgaatcaaatttctagagattccttgtatcaaaaagtctcacttgtccaacaaaagaccgctatttttcagaccagtattgcttctaatctctctgtttttaatgattttgaacttgaaagagttgttgatgcattaaataagagtggcttggccaatcgctttaactacgagaaattattagaagaccaagaaaacaaatggataaattttctttcaggaggggaattaaggagaatcgaaatcgctcgcgctgtctttaaaaattccgatatcattctattggatgaaccgacttctgggctcgatagtggaaatgagctgattatcaaagatttgatcaactctttcaatgataagataattatcgtagttactcattcaactagtcctgattttctagactcttttgacgagctgattcacttagatgctttacccctcaaaaaacaaaacgatccctttattcgcttgtctttatgagtccctccttgaacttgttagaaaaagaactgaacctagtaaaatgttctttgtcatactactaatgacaaagaacatttgagggttattgtttgagactcattgacttcctactaaaataaaatttcatcagattaaaaaattcttcttactctatgttaacaaaatattctgctattaaattagttatagagcgcgacactttacaatcaccgttactctaagcctttctttagttctcgcattcgctgcatccatcctacgtcttctacagtaactattacttaataacaaaagaacgatacttggaataggctatttgatcgataatagtaaaaattttctttatctctaaatctgcgccgattgccgttacttgatagaactgactgtaattgttccctaatgcgggaaggtaggcattagagatcaataaatcaaatggttcatcacttgtatagggtaggagaacaacgtcttgtttccctttcaactcattttctaataagtaaatagaggcatctgccaaaatactagagcccatatttaagaccgctattctcacttgatactcctctttaggagacagcatgtaaattaagaacactaatctttttttcaaatactttaatttcgtgtggttgaacaatttagtcggttcaataatattttctattatgtctaagacaaactgatttctaaacgaattgttaaacaagttatggtaataattcaaagtgactttatcgatcgaataattgaccccatgaaaataataaacttgggcgatgagagaaaagacactggatttaatggttgaatttgactttagtttataaatcgactggatcgcggccattatttcatcggttatctcaaagacgggatttttgctagtatataatcctagtcgaatttcctcataggggatcccaccaactgtaattaaaaataagcagataaaataggtgacgattgtcgcttcatctgatgaacaaatatatttttttgaaaaataactatgccgaatgtatttaaaaactggcatatctagacagcgattgatctttatttgctcatcttggcctacttcgctgtcttttgactctggcgttaaaccagtgacttcttcaacagttggcttatctgcagtgtagtgctcaatttctggactagtcaccgcatcaaaggttgtgtcatcgtctttggcttgccactcaccatacgttgtttcctctgtggcttcattggtggtgactgttcgggtgaaagtgactgtatccaccttgtctggggcggcttctgtaccgtcttcatacagataatggatcgtttgttgcacttctttggtctcggttgattccaccatgtttgccttgtaagtaaccgttacttcgctgtctttcgattctgctgtcaagtaaaccatttctgccacaccttttttatctggcgtatagttggctatttctggactgaccaccgcatcaaaagtggtgtcattgtctttggcttcccaatcaccataggaggtttcaccggttgcttcattaatggtgactgttcgtataaattctattgtatccacatgatccggcgcggattctgatccgtcttcatacaaataatggattatccgtgcgattattttactttcctctctcgtttctattttagggctgtaaacatacgtgactgtttggggatttttgctaacgattcctgtctcatcaccttgcacttctttcaagatatatccagggatatctttcggagtaatcgtatatgaatcgcctatattgccaccagtcattatacttgaaggaagtaattctttcccctcttcatcgatataattcactgtgattggtgccccttcaatataccttggctgccatacataggtatcagccatagtcgctccatcataattcaataccagttccttagacaggaatacctgatcaccataaggagcgtctatcgtacctgatccaacattttgccaataaccggtataatagcttgaactaaatccaatcattccacttggatttgtcaaattaactgggtactcattacctggccaattgttccagccgacaaagctgaatttttcccctagtcgtatttcttttagatatcgtgcatttgctagaaattgattcattccagcccctaaggctttgattacattggtactatcaaaatttgataaatctaaactagtccctctaaagccataaaacatgctgttcattgttgtggcttgacttgtatcaagcaaatgtagattcacgatttcatccaactctgaaggcacttttccataatggccagtgctttcaaatagtccaggaacatctgctggaagaacaacaggggcagtgagaactacttttctaatagtcatgtttgatgaaacttctgctattggaatcacttgatctaccgttgtagtaagcgtgccttctcctacagttagaactccctcaatatcaagggttgctggagcagtcccccacattccactccaaatgatattgtctgcaagagcagccttcttttcttcagttgctgctgtactgtctgtcgacgcttctgaactatttttctctgcatcttcttcagattccgttttagttgctgcaaattcttctgctgtcgcttgctcttcagattctattgcttctgactctgttcctacagtttcctcgactactttttctacttcttgctgttcaggcaacaactcccccgcagtaagcattgtttcttctgctgctgtagtgctaattgatgcagctgatgcaggaatactaaaaagtgcttgtgtaaaaatcgggctgcctaatataaatacagaggaactgacaagaatacgtgatacgatttcttgcttcttcgatcttctcattatttttccttctttctatctaagtgaatgaacacagtctcgttctatccaatgcaaaaaagctgtcaactgacaactacttcagacatattttaatactcctgttgtcctcattccttaagtatgtattatcacatggctctgagtagcgaacacgacaacatctgctctaaaaaagacaagattcgtcctgtttaaaaaaaataattaaaatcctttggaaattatgacaaaaaagaaaataatcacattcatatcagtatttcaacggattatgcgaaaagattttgaacatggaagatctctttttattcctaatcattcacttagagaaaagacaaaaaaaccgcaatacaagcgtttgagcaaatcaactgtctcaacgataaaaggacttgcccacttgcgcagcattgcatcaaaaatatcgtttagagttgttttcactgtcacttatattgcagtcataaaaatggataagcagtcatacttgcagccacgtgttttgggtctgctaagtattcgcttgttgatcttgaacatttgatttagtcaagttcacaccttagctgttgatactgccaattcgaaaaagatcgtcactagcagatacggatatctaacgttatctgtaatgattctatagtgaggtatctgtccctgtttcttgaatagactcattaatagactcattttggaacttttcgatcgcctcgactaattcaagccagcgatctccggtggggaaactattccatctaaagaaacgtacttcgcgattttgattaataaagtattgacgatcgacaggataatccatcacgacaaaatccggcttttctgatacaaaagaaagagtatatccaaaccatcgttttaatcgctctttttgcctaatttcctgaatttttccaaattttgattcatgaaaaacccgcacagttgaccgatcaattctagctacaatcgaaagaagcatactgtactgaaaaagcaggcggttatttgagacatacagcgtactaaaaatcgatgattgttctgataacgattggtacatctcttgaaccagtggaaatagtttagggaatactcttcgataatctttgtctgttgttgtttttccaaaagcatcaatcttatttttagaagcaaacatgagagaggttgaatggatgttcaatgcattgacaaaaagatacgttgtagcactatcaggaacaagaaaagcttgtttcgctgtttccgaaaaaagtttagcggcttgtaagctctcttctgaaaaatgatttgtcatcgtcaactctgtagggatctcatcaggtaaataggtggtcattactgaaaacatataatacaagaagatattctcattttctgaagtttcatttaacaaataattatctcttaagaggggcattataagctcctttttgaattgctcaaaaggaatagtgagatggcatgtttctgtcattcccggtggaatttctttcaaagcaaatcctctctttaaacgatagagacttaaagccagtaattggataaacttttcttgatcgattcctcggtaacaacttggatacatcgcgagtctttctttgaaaccagtaatacttttttgagtcaggccaaaataacgtacatttgagccatcaaaaatttgccaatacatgatatgaaaaaaatgcctaatacgatattcttctcctacaaataacggcttcctctttaaattcaacgaaatattataattttcaaggatatccatgatctccttgagttttctttgaaccgtgcgattactcacaaaatgctgttgcgctgtattctccaaggataaatatttctctctgaataatcggtccaatatttgaaaaggcatgctttcttctaacatgacagaatataacttagaaagtaaaaaatttgaggcaaatcgaagtgaaatggttcttccgtcaattatttcgatatcataaaagggataccgttctctcaaatccagtgcacggtcaataactaaaacaattcttcttttcgaaacacttaatttatttgccaagtcgcttatactttcatattcctcagcattttcaaaaaaataagcaaatacttcatagacatcttgatctaatttagttaaaagaaacttatacatgccctcacctcttaacctcttactttaaataaattatacctcttctaccttctaatatcattgattgtgcattaatccataatgtttttgatttttttgataattatttaaatttctacttaaatagccagcctatttcattttgtctcataagtgtcctttctctttctcctcctattgatctgcataatcaacttccttcaatgctgcgttacaatccagtgtcttaatcagtaacttttcaatgattgaatatgaaaaaagatatattctataggattttcatctagaacattactgtatgatacaagtgccattttttaacataaaagtgatttttactaaagaaaaattgaatgactagatgatacagtcaaactagcaaacattcaaatacaaaacaaaaatgaagtgtccagaaagctgttatttcttaggtactttattgtttgaactgaaaattaggcttttatacaaaaaaacatcaaagctaatgaatacactttgatgttcataaaacagttttaggataacttattaacgaattatctgagtatcctcgtatcatcagtaagaaattctctagatacattggttaaagttctattactcatttctttgataattgactaacggacccagacatgagatgcccaaggttcgcttttattttttcttccggccagtcccaccaacggaccttttgtaaatactgaatcgtttcatcattaaatctttttctgattggtttcgcaggaacgcctcctacaatggtatatggcggtacatctttcgtgactacagctctagtacctataatggcgccgtctccaatcgttacgcctgccaggatcagtgactcatacccgatccagacatcattgccaatcacaatatcgcctttattgtcccatgcagcagccacatcggctttatcaagaccccactcttcaaaaaatagcggaaatgtatacttggaacgcttgataatgagtggtttgcagcattaaacagaaactttgatccacaagcaatggaacaaaatttgccaataatcaatttgtcatgattgattgggtattgatacagcacattattcctttcaaactcgcgtggatcatttacaaaatcattataaatcgtgtattctccaacgctaatatttgggttagtgatggcattctttagatagatcgtttgtgtatcattggttcttgggtaaattttatttcgtgaagtagtcataatattcttctccttttggtgtgttaacgtttgactatttcacatactacaatgcactttttcatttttttacctcttctcaatttatgtacgtaatgaatatatctaaataatagtacttgaaatagtaagcagctgaagaaaaaaccgctactaacatggtatttcattcaactgctacgaatacgggacacttcaaaatcaatgtgcttaccacaatttaaatcaaataaattatagccattgtatactcataaaaaaacttacaccaacagttaaaataaaacaaggatatttaaataaaaaagacaggatcctttttattcatttgtgttctccagaaactatatacgattctttttttgaacgttacaaagaactaaccactaaaaactattgggcaaattgggcaaaaaatcagtcttttcatgactataacggaacaggcaaggagacaatatatagctcgactactaatagtactatgcatgcgaataacataagattttctcgacgatcatggtttggatgaagataggcttctgattttggtctatctttaatatcatcttgtctaacttttcttctaatcaatgccactcctgaaccgaccgcccaacacaaagtgaacagaataaacagcccaaacgatagataaatttgtttaccaatagcaagatacagtagaaaaaagtcaatcagcttaatcgaaaacaaagcgactcttcgcacctttcgtccataatagatccaactataactcatgcaccctcactccttcttaaatttaatcactaccttttgctttcatattttgacttaatgaaagattttctcatcgattcttagtataatttcctcaatttgtatctcaaaaaacatgattataaataaatatatactaaaaaaataaagtatccagaaaaaatgatatccagacactttattcatgttcttactataaataatacacttaatttgataggttcttttttcgtttactgattctatacgataagagaattagtagggttcctaaaatcaccaacattgattgtcccaacgtttcttctcccgtagctggcaaagtccctctagaatcattctctttttcattatttttatgaagaacactatagacatacaccacttcctgcgcttcctcgctgaaaattccagaagcattatctggtatctctactacataccagcctgggatctctttggcttcactggcatatggtaacccgacttttccacttaagacagttggctctgctaattgatttccttcactatcttggtatttcacagtcactggtgccgcatcactgcgttcgtatacatacaccacttcctgcgcttcttcactgaaaattccagaagcattatctggtatctctactacataccagcctgggatctctttggcttcactggcatatggtaacccgacttttccacttaagacagttggctctgctaattgatttccttcactatcttggtatttcacagtcactggtgccgcatcactgcgttcgtatacatacaccacttcctgcgcttcttcactgaaaattccagaagcattatctggcgtctctactacataccaaccagaaatctctttggcttcactggcatatggtaacccgacttttccacttaagacagttggctctgctaattgatttccttcactatcttggtatctcacagtcactggagcagcttcactgcgttcgtatacatacaccacttcctgcgcttcttcactgaaaattccagaggcattggctggcgtctctactacataccaaccaggaatctctttggcttcactggcatatggtaacccgactttgccattcaaaatcgttgggtcgcttaactcattgccgtctgtatctttatatctgactgtgactggtgccgcatctgaacgctcataaacatagaccacttcttgtgcttcttcagtaaatacaccgactgcattatctggtattttgaccacgttccagcccgtgatctctttcggattgctttcataagccataccgacttttccacttaaaaccgttggttcactcagctgttcgccttcagaattctgatacttgactgttacaggagctgcatctattaaattgggctgccaaacatacgtatcggagtcagtttctccattgtagtttgccattaactcggaagccgaccaaatatttagcccattcgggaaatctattgatcctgttccaacattgacccattttcctgtataaatttctgatgaaattggactaggcaacattgcatttgtatgaaatgaaaatgactgtcctaatctgatgatcttcaacgattgcataccgctaaacatagaagacatattcgttaccttactggtatcgaaacttgatatatccagactagagactctatttaagccctgaaacattcgatccatattcgttacttggctagtatcaaaattgcttagatccatactgaatgtatcgagatcacttcttcttaggtttgcgaacatcaaagacatgtccgtaacatttctcgtatcaaaattgcttaaatcaaatttatcgatattaatcacattcgcgaacatcaaagacatattcgttacatttcttgtatcaaaattggagacgtccaaactagtcaaatcgaacagtccattgaacatcgcatacatattagtaacgttacttgtatcaaagttggatacatcgagctttgttaaccctcgagtattattaaacatgccagacatattcgttactcggctagtatccagcttgtccaagccttctatttcagtaaggtcagcccacgtaccgccggagttaccaaataaataagaagaatcctcaccagcaataacattcccctcgaacacaatttttttaaccctgtaccgggaccaagggttaatctcagaagtagatcggaatgttccagatccgatatggagaactccgtcataagtgatataccaatctgaagtaccataagttcccgaggccatattttcagtaggatcttcagtagtttgattctctattgcatctgtttcattttgacttctaacttcattctcacttgaagaagaagtcgattcgttcagttcgacaggttctgaactatctgattgactaagttcactgggctctgtattccttccatcattatctttcgttgaatgaatgtgttcatccttactatcacgagacattaaagtttcttcttgttccacagcgatcgtgctctctactgtatcctgtatagaaacagtatcttcagtcactgaatcagcgctaacaaccattgtccatggcgcttgatttaacaacaagcctcccaacaatagtatcctgctacactttcccataccaagtcatcctttctcttttagtctttctctttagtatccatattccgattatcatcaatggatgttattacctacatgttttgtattgtctctgtgctaaaggtgttttgttaatcaaaccatgcgctttacctgctgattcgctttcaagctttcaataaggttcgatctaaagagttttctttaaaaagttgttcccaaccctcaacttcgacaaatggattttctgaggctttctgtatgcatgtaccttcttctagtgccaaaaatcttcgttttttagataatagtttctcatttagacattttttcgacaaaaatctataattcaagttttgtaagacattcgaagttttcggatgtctattttcgtgttgtcccaaaaacgaaggtttttgagacagatagattattttacattctctgaatatattactattcatcgcagctttctcttaatcaactatttctccagacagtgaaatagttgatttgctttttactccaaccttatctacagttccaaatcaaatcgcttcgcctatccttgctttttttgttaagataaagaaataatgagtaagaatttaggtgatgatttatgcgactgttgtttttctttttccttttcacatttttgattggatttctcttctatttattgacccgtcgcacgatcgccgaagtctatcatgaattgaccgataagaaccgcttctttcgaggcatcaaagctttcttcattggaatttatcgcattttgacttctgtttaaaaaaaactgtccaacaacagatctcttgatcgttgctggacagttttttgtttgattcgtcttctattgattcttcatattggaggatgtatcatccactgctcgttgtatttattaaaagcaattttttgcctactggatcaaaagtttctatccgaaatgagtgatacaaagaatcagtgaactgtttgttcttagttcagtgtcatttcctcaaagcaagatgtaataattgatttgactgcctcttcatctaaacgtacaaatggtccatctgtgtttaactccccatgaaccactgcttgttggctcatttcgtcaaccaattcggttgtttcaattccaactttttgtaatgtcataggaatttctagttgatcttcaaaaaactcataggtggttcttactgcttttcgagcaatttctgcttgtgaatcgccagttaatccccaaacggcttctccatacttcgcaaatttttcatgggtcgatggatcgtgagtgatacaatacgccatccagcgtggggttaaaattgctaggccaatgccatgggtaatatcataaaatgctgacaactcatgctcgattggatggcaggtccaacctccactgcgaccattacctaccaatccatttaacgccaatgtagatgcccataagagattcgctctcgcgccataatcatctggattttcgaatgctactggcgcaaaatcaatgacgactttcattaatgcttctgcaatattatcttgtacttgaacggcctttgttcggttgaaatattgttcaaaaagatggctcagtatatctgctgctccggcagcagtttgccacttggacacactgaatgtggtcgttggatcaagaaaagaaacatgagggagcaattcagccccgccagtacctaatttttcctttgtatctgcattagaaataactgcattccgattcatttccgttccagttgcagctagggtcaaaatatcaacaattggaagtgcctgttttattttgctgctatctacgactagatcccatggatccccttcataaaacacgcctgcagcaatgacttttgctgtgtcgatgactgaccctccaccgattgccagaatcacttcaagttgatgcttgcgaattaattttacgccgcttcgaacagagtggattttaggatttggttcaatccctgataattcgacgacttcaaacccgcccttcaccaattgctgttggactttgtcatagagtcctgatttttttattgatccgcctccgtaaactagaagcactcgttttccaattgatgaaagggcttctggcagttccgacaatcgatctgttccgaagcgaatatctgtaggtacataaaatcgaaaattttgcatgtttatttcctccattaactaacttcttttcgtcgtttcattgatagcattagcttttccttctgagagtgacgtcaaacatcttttccaaaagccactagtagctacttgccaataaatcatttactctcaaaaaaccaaagaatattttcgatgagggttcgctgattcatatcttccaacattcctgcaagactatgtgcaggtgtataacaaagaacttttccttttccataagaatgccgccaagcagccagagattcaccatagatagaaaaactgcgcaagaaaaattcagtctcttcttgtttgacttgggtaaaataatgttcatcgtaaaatgaaaatgacgtaccatctgttaattgataggtaacttgcgtttgcttaggatgatggacaaagcgacctttcaataattgatgatagcgggaagtttccgggtaacaagaaagaccggaatgcagcgctaaaagattgccgccttcagcaacatagttttccaacgcatgatctagctcttttgtcagccacatatttttgacagcgtcacccagcgataaccggttttctttagaaagaatcactagatcaggcttgtctcccaactctttgcctaattcctccattccactgtccttccagtaggtcttttgcggtagctttttcagaatagtttggataaattgaactaacggctcgtggggatgataaggatcacccaaaatactcactacttttttcataaatgattctcctgtctcaacaaagaaaagagtgaaaataaaagttttctctttctactattgaaagaattgcttttaattccactctttttttaaatagcagatgccgctggcgaatcagttgatcgtttacttttttctaaacaacgtctacgctcttcgattgcggttatgcagatagcacttgtttatttactagaatcttctactgtttcttcagtagaatcttctactgaatcggttttgatttttcctttttcttcaccgtatgacttcaattctgctgctggcacatattttacatcgattggaatcgtcgcatcgattttttctccatcaatcgcttttaccaagttttcgataacttgatagccaatttggtaagcatcttgatctacgattgcagtgattcggccatcttcaataccttttaaccatgtatcagtgtaatcaaatccatagtgtaaaatttttccagattttccttgagattcaatagcactcattacacccacatctggtccttcagaacctaatgagaatactgttactaagtctttattcgctgagatatacccttctaattgttttttagattcagaaggttgatcattatcttgaattgttgccaagaatttgaagtttttagcatctgtgccatacacttcttcaaagccttctttcaagcctttttcgcgatcaatcattgttggctgtgccacatccacacagacaatagcaatcgaacctccagtaattcctttttctttcatttcttccgcagcacgttttccaagttcttttccggcagaaacgttgtctgttccaacataagccgtacgatcatctggattctctaaatcagcgtcaaatgtgattacaggaatgtctttatccattgctgctttgattggatcaacaaaggctttcttttcaattggcgcaatagcaattcctgcgacatttttagcagttgcttctttaataaacccaatgtgtttttcttttttacttggttcagcagaaggagatgtttttgtaactaacgtgtacccaagttctttggcagcatcttcggctccttttttcataggattccagtatgcccctgtgtcaacgataggaatgaaatacagtgttttgtcattatcgctgctggccgccgagctcccgttactacagccagatgccaataggaccattgtcatcaaaatacccgttaaaacaattttgctttttttaaacatttttatccgctccctatttgttttatcttttattatcaattaatcattttacgactgacgacttgcgcgccgtttcaaataatcaattataatagcaaaaatgattaccaaacctgtcacagtatcttgtaagaatgagtttactcccattagcgttaaaccgttcttgaatatttgcaaggttaagataccggcgactgctcctccgattgttccgataccgccactaaatgaagttccccccataattgctgctgccatcgcaaacaaatctaatccattggcatccttagaggcgcctccattcaaattcgatacaatcaacaatccagcaatagcagccagcatgccttcaatagcaaagattttcacgatatgtaaatcaacattgattccagaaagtcgtgcggcttcttgattggatcctactgcatacgtatattttcctaaacgagtcttattcataataaaaacaaaaatgataatcacaatagcaaagatcaacgcattgctcttgatcatctccgttccaataggtgttttagcaagtttgctgaaccattctgtttccgaaccaataaattgctcatccgtgaaaaaacctaacattcctttgatgacataacttgtccctaaagttaaaataaatgcgggcaaatcaaacttctttattaaaagcgcattcataattcctaatagagcaccgacacacaatgagataactattacaagcggagccggcattcctaggttagcggtatataatccaaccataccagctgccattcctacataaccaattgataagtcaacgtatccacaaatcagcaccataccataagcgaccgttaaaattcctactggcggaatttgctgcaaaaagttctccacattataagtgcttaagaagtctgcattagctaatgagaaatacgccactagaacaattaacacaatgtataccgaataattcataaaaagcgtttttaggttccatttttgttttacattttccatatctatatctccttcattcaaacaaaagataagtgaactcgagatgaatccaataactattttattgatccgtcgttgcgtatttcataattaattcttgtgcctcatctcttttatctgcatactcactgaccttaacttcaccggcgatcgttccctcacaaaacacttggattcggtcgcagatacctaacaattctggtatttcagatgaaacgatcaaaactgttttcccttgcagcgccagcttattaataatcgagtagatttcggattttgccccgacatcaattcctttagttggttcatcaaagatgtatagttgactatctttgtttaaccattttgctaaaacaactttctgctggtttcctcccgaaagactggcaacaggattttcgatattactgactttgatattaatatctttgacaaatgtctgtgcattctcttttaactgattttgatttaaaacaaaattttctaaattggtgatgttgatgttgtctttaatcgaaagatttagcaataagccttgatgtttacgatcttctgtcaataaactgatcccattgcgaaccgcatcaacgggggattttattgaaactttttgttggttgattttaatatcgccggtctttatgcgatctgcgccaaaaagcaagcgcatcgtctctgttcggccactacctaccaacccagcaaatccaagaacttcaccttttcttgcttcaaaactgacatccttcacacgttccaaatgatccgataaatgatttacctgtaaaaacggttcaccaatgatagttggttgtttgggatataagtctttaatctcacgccctactaacatagatatgatttgatcttcggataagtttttcacttcgtctgtggcgatgtactcaccatcacgcataatcgtgattcgttcacctagttcaaaaatttctttcatccggtgggaaatatagatacttgaaaaccctttttcttttaatcttcgaataataataaataatacttcgacatccttgtcggataatgaggttgttggctcatcaaaaatgattacttttgcattcaggctcagcgcttttgcaatttcgattaactgcttattagctgtggataacccagctacaagatcagtcggtttcacctttgcatcaataagattcaaccaatactgagtatcttcataaagtttcttgtagtcgacaattcctaatagctgattcttataaggtaaccggcctatgaacacattttctgcaacagataaatcttccgctaaattcagctcttgatgcacaaagccaatccctaacttagttgctttttctggggtcattttgtggatttcttttccttcaaagatgatctctccctcatctttgtctattagaccagctaaaatgttcatcagtgttgattttccagctccattttctcccatgaaagcatggatttcaccttttcgaacttctagtcttgctttttttaatacatgtacaggcccaaaacttttttcaatatttgtcattgaaaacaaaagttcattttccatgaaaacctccttcttgtaaaaaacgtcagcctattttctacaataatcgaaaacatttattccctgagcaggagtgagactaagaatggctgattgctcctgctcagactatttctatattactgaccaagtagtttagactaaataatcattcaagcgtgatttgacatattcgatgtggctagattctaattgaatatcctctaattttagtgcatattcagtcagactttctaagtcctcttgatcggaaataatggatgcaccaatccctgtttgaaagctggcatagcgtttttctttcaattcatcaaagaaacggtcttctttcaatttaaccgctgctttcaagcctctagcaaatgtatccattccggcaatgtgggctaaaaacaaatcttccattgcaaagctcgagcgccgaacttttgaatcaaagttgattccgccaggagcaataccgccgttttctaagacaccatacattgcaagtgtgacatcgtaaacattcgtcggaaattcatccgtatcccagcctagcaaaacatctccctgattggcatccagtgatccaagtgcttggttgattcttgcaacttcgatttcatgctcaaatgtatgaccagctaatgttgcgtggttggcttctaagtttaatttgaagtcacttgctaacccatatttttgaatgaattgcagtgcggtcgctgcatcaaaatcatattggtgtttgcttggttcttttggttttggctcaatcaagaattgcggtttatgattgattttatttccgtaagcgactgccattttaaacaggcgggcaatgttgtcttgctcaaatgccatatctgtattcagcagcgtttcatatccttcacgaccgccccaaaacacataattttctccaccgagttttttcgaaatatccaatcctttttttacttgagcagctgcataagcaaaaacatctgcattatttgttgacgcagctccgttgatatatcttgggttactgaacatatttgccgtattccaaagcaatttgattcctgtccggtccatttgctctttgatgagatcggtgatttcatctaggttcttgtagaactcttctaggctatcgccttcaggtgcaatatcgacatcatggaagcagaaatactctgcgcctaatttttctaaaatttcaaaaaaagctactacacgatttcgtgcagtctccatctctgttgcgccaaaccaagtacgctgattcactggtaaaccaaatggatcactaccgtcttgtgtcattgtatgccagtaagcaatagcaaaacgcaaatggtccttcatagtttttccagcgataacttcctctggattataatgacgaaaagcaaatggatttgttgtttgagggccttcatacttaattttttctacatttggaaaataactcattctctattcctcctaaaagcaaaataacaatattttatagttcgtttaccttacgaactaacttaacaaggatattgtatccgctttccataaattagtcaagtgctatttataaatcaaagtattcttcttctctgtcttcattttgagttaaaatgtttattgtaaaggattcaattttgtttcacatacaaaataactagcaaaaaaacgagaaaacatctacaataaagtaagtatatttaattaataaattaacgaggtgaatttatttatgaccaaatcaacttatatcagccgtacaaaaaacgaatctctttgtctagaattgattatgaacaatcacaatctttcccgggcagacctttcaacaatgactggacttaccaaagccaccacttccgctatcgtcaaaaaattaattgaagatcagctagtcatcgaaatcggcactggcgaatccagcaatgttggcggacgcaaaccaatcattttgcaatacaacggaaaatctggactttccatttccattgatattggctacaactatatcaatggactattggcttttcttgatggagaagaagtccagtcgattcaaaaaaagccgatccatttagatgagcatacgatcaaagaccatttcactgagctttttaatcactttaagaaatccttgccagaaacttattatggaattattggtgtagtgatcgctgttcacggtcctgttcatgagggcaatgtcatctttacgccccaccacgagctggctcagattccatttcgggacattgccgaagaattagtcgattatccggtctacttggaaaatgaagcgaatctatctgctttaggggagtataccttctcttcgaaatcttctagtttgatctgtatcaatatgcatagcggcatcggtgcgggaattgtgcagaacggtattctacaaaccgggacaaatggactggcgggagaaatcgggcatcaaatcgtggtacttgatgggattgagtgtccttgtggcaatcacggctgtctggaaatgtatgctgcaaataaagtttgttttgaaaaatttgcgaacataaaatcgatggattatgtgaatgccatcattttgcgcgaatattaccaaaataatgatccggatgcgattcatgtaactgaggaaaatgtccattacttaagtgctggcatcaacaatctggttgtacattatgatccagaggtcatcatcttgaatagttctttgtatcatgaaattcctgatatgattgggcaattaacaaaatcgctacatagtcgtttctctgaaaaagtgattgttagaagtagtctattagatgaaaaagctaccttgctaggcggccttgtttttaatcttcaacgtttcctaaacatcaaacacttaaagctgaccaattaactgttccactatctgaatgtttattatcacttcgcgcttcacattactcctaataaatagcccttaactaggtgttcatttccacctagttaagggcttcattcctattttacggaatcagcttcatccccatattccttgtattcaaagaaatcgaattgggcttcagtttcatatccagaataatccactgcggccaaccctacaaaggcgccagtgaaaaagccgccagatgtttgcagtacatagtcatctgacaaaacagctgcatttagcgtcacagggatcgtctgccaattgtttccatcaaacgagtattcataagtataggtttgttttcttgcttttgttttaaaccagacatactcgatcccctccggaacattgatggctgcgtcctttaaataagaggtgtaaacacccctgttattctcagctacctcaataactgtgccatttatttcattccacgtcacaaatacaaaggaccaatgcttgtcattataatagttggtcaatcctgccatttgctgatacgaaaatggggaaaattttacttttgtcacggcatcaaaatagaaggcttgccatctgcgagcaatcatggataagtcatggcagttagcaagactaccccggccaatcaatttcagttgtccgtttccaacacgccccatctgacttgaaaatggcacgcgcagtgtattccagtttatatccagtttttcatcttggaaatcatcgatttgtgaatgatcgtttggtgcttccgtcaaaatcgcatctttaggtgcatcaacataagttgttcctccgtgcccccctactattcttggccagccatcttgatcccattcgactttttgaatcgatgtttctctacctaatgttgaccatcctcttggatcagtaatcgattcatttggatgatgccatggccgtgcagcgagtgaagcataataccattcaccacttggcgtatctactaaggcaccatgtccttgtttttgtagataggaatttggggtatcaaagttcgttaggaatggaccatctggttccgtttcaaatgaatctgcctccaatgttttagagcgtgccaccacttcttggtgggtaaaaacagttcccccttctgccgcaaaaagataataataaccattgattttgtaaaggtgcggtccttcaactaatttgactgctgtcccgcgatagatggttctagcagtatctggctttaatttcatcgtctgtgtatcaaattctgttaacgtgattccgtcaaatggatgatggtattcgcggtgatcccatgtttgttggactaaatatttgcgattgtcctcatcatggaataaagaagcatcgaaaccaacaccattcaatttaatcggatcagtccaaggacccttgatatctgtcgctgtcgtcaagtaattggtcatatctttaaatgcaccatcaactactttgacatccgtatagactaaccaaaattttccatctgcataggagagatctggtgcccaaattccgccagaagaagggtttcctttcatatccaataatgtcgttgttgataaaggagaaggcaatagattccaatgaaccagatcttttgactcatgcaatctcactcctggaaaccattcaaatgtcgaattggcaatataatacgtatcttcgacgcgaatgatcgatgggtctgcattaaaaccaggtaaaacaggatttttaattttcatactaactacctccgtatatccattatttaataaagggcggcttattttacatcgttttcaaagccctcctaattttttctagcaacaatcagccgaatgaaacgctttcatatcggcgtatattagaccccttgaaacaccatttagttctttcaactatattgaagtcacaataggagtcacgcaatagcattgactagttaattaacatatagggaaatctttcggtaatagaactcatctcccgttatcatttcttcttttttctgagctagcaatcgctctaagaaacatcctttgtcagtgaccatggtgacaaacaagttagttcgttttatttccaaaccaactatattcctcatagtacacgcttacaagaaaaaaagcaagacctgttttttcccgtaaaaatcatttcctgcgcattccctctatttagctactattttcattcgttcaacttatatctagaaaatttctagaccctaatttacttataacagtctcagcttctttccatttatagtgtctgtaaaacaaaagaccatttagattctgtttaaaaaaaactgtccaacaacagatctcttgatcgttgctggacagttttttgtttgattcgtcttctatttcaatggtttccattgccaatcttggacttcagcaatgtcatagccattctcacggataaagtcatagtgataggcaaccgtctctgtcattcgttgcgcaaagtcggcagcttgttcgccatagacccactcagcgccgtctttcgctaaatggaagcgatcaagttcagataagatccgcatgtcaaatggtgtggtgatatcgccattttcacgatagccatgaatatgcagacgctgattcttgcggccgaagaaaatgtcccgaatcagtccttcatagccatggaaagcaaaaatgattggcttgtccttagtaaagtaagcctcaaattcttcatctgtcaatccacgaggatcgacatccggatgacgtagtttcaataaatcaacaacattgataaagcggattttcaactctggaaacgcctcattcagcaggcttacagcagcgagagcttctaaatttggctctgtccctgctgcagcgatcaccaaatcaggttctccttggtctgttgaagcccaatcaatgatctttaagccgtcttttaccaatatctccgcttcttctgccgtataaaactgcggccgaggatgtttcgaagaaacaatcagattgatctgttcttcagtttggaatgtttctgccattacagccatcaagctattggcatctgctggtagatagacccgtacgaattccgcttttttctcagcgatatgtgtcatgatccctgggtcttgatgggtatacccattatggtcttgctggaatacggttgaggaagcaatcaaattcaatgacggataggcatggcgccaaggcaattctttcgatttacgcgtccacttaaagtgctgagtgatcatggaatcaaccactcgcaagaaagattcatagctagcaaaaaagccatgacgcccagttaagacgtagccttctaggaagccttctgcttgatgctccgataattgggaatcaatcacccgtccggtagcacttagccattcatcatagtttggctgttttggttctaaccattggcgatttgtcacttcaaaaacatggttcaaacgattggatttggcttcatccggaccaaagattctaaaattagtcgggttttcaacaatcaaatcccgagcaaactttccgaactccatcatgtcttgagcagtggttgagccaggaacaccaatatcgatcgcatgctgtcgccaatcggtgattttcaacggttgaggatcgattcccccgttagtgatgggattcattgccatccgttgctgtcctttcggcgcgagttcttgaatctcagccttgatgcggccagattcatcaaagagttcttctggcttatacgatttcagccaatcgattagtgcatccacgtgctccatctgatgcgcattgactgggataggtacttggtgggcgcgaaaaccgccttcaatcggctctccctcccaaatttttggtcctgtccatcctttaggtgtgcgcacgatcagaacaggccagtggggcatgactgcttcatcagcttttccttgacgagctttggtttgaatcgctttgatctgctcaacggcgcggtccaatgctctcgccatttgcggatgaacagtagcaggatcatctccctcaacaaaataaggtgtccaacccattccttcaaaatacttggttaggtcttcatcagatttgcgagccagaatcgttggattagagattttagcaccgttcagatgtaagatcggcagaacagccccatcatttaccggattgataaatgtattagaaaaccagctgcccgctaacggaccggtttcagcttcgccatctccaaccacaacagcagcgatcacatcaggattatcaaggacagctcctgttccatgcgcgatggaataacctagttcgcccccttcatggatcgatcctggtgtttctggtgccgcatgggaagcaattcctcctgggaaggaaaaaattttgaaaagatgctgcatcccggcctcatcttgggttacttctggatagatttccgtataacttccatctagataggcattcgaaaccatcacctgacctccatgaccaggtccttcaatgtagaacatattcaaatcatatttattgatgacacgattcaagtgggtgtagataaaattctgaccagcaatggtgccccagtgaccaatcggattgactttcagatctttttcttcaatgggccgccgtaacagtggattgtctttcaaatagatttgtccgacagaaagatagttggctgcccgccaccaagcattcattttgtcaaaatactcttgggtatcaaatgttgtctccatactactcctccttgctttctcttaattaaaagtctatgcgtctcgattttaaaagtcaattttgctgattgtacaccttgcatctctcttatgatttgtctgcttcagcacaagaaaaaacaagaccagagttcctcccaacatgtttcagtatgagagggtttggtcttgtcagtgttggctcttttctgttgtcttgtctacttttttaatagctacttgatcgtcacatagtccaaaccaacgagttttgcccacgtctcgatttgatctgacgtcaacgctaatgaaacaaccgtatgatgtccgcctcccgtttcgatccattgtttgactccttgatgaaagtcgggacgaggcgtccacatcacgcgagccaccggcaatttaggtgcggcttctgttggctcaaaagcatcgacttcattgatcaataatttatagtgagtgccaaagtcggccatagatacaactactcctgcgccaccttgtccgtcaaagactaatcgtgctgggtcttctcgatcccccattgatagcggcgaaacgacgatttttggtttattgacagccaatactggatccacttccatcatatgcgactgcaagatggcttctttgccttcggtcaactcataggtatagtcttccataaaaccggttgctttattatgtgccatgatcttcataagacgatcgatggctgctgttttccagtcaccttcaccagcaaatccgtatccttccgccatgagtcgctgtacagctaatcctggtagctgttgcatgccataaagatcttcaaagttggtcgtaaacgcactatagcctcctgcttctaagaaacggcggatgccgatttcttgtttggcctgtactttcacatgtgcttcccagattgcggcttcataatctccctgatcaaactcatacaaattacggtattcttcaaacaagtcattgatctcttcatcggtcacagcatcgattacttgaacaagatcaccaatgccaaagtaatccacggtccaaccaaattggatttgtgcttcgactttgtccccttctgttaccccaacattgcgcatgttgtcgccgaaacgagcgactttgatagcaaaactttcattgtaagcaaccgccacatccatccaagctgcgatttctttttggaccgtctcttttttccaataaccgacaacgattttgttttgtttctgcaaacgcgcattgataaaaccatattcgcgatccccatgggctgcctgattcaaattcataaagtccatatcgatggtctcccaaggaatgcgttcattgtattgagtcgccaaatgaagcaatggtttttgcagcagtttcgttccccggatccacatttttgctggtgagaaggtatgcatccaagtaatgacaccagctacttcatcccgataattgacttccttcatgatctttgtaatcgtgtccgcagtgactgccaattcttgtaaaacgactggataaggcagatttccactgtcattcaagcgtttgaccatttcagctgcatgatcgcggacttcttgcaaggcttcttccccatataagtgctgagatcctacaacgaaccaaaattcttttttactgattgctaacatattgtctgctccttcttgattatttttgcccatagtaggcatctttgccatgttttcgtagataatgcttgtcaaggatgcgctgcggcagttccggtgcataactattgatctgacgcgtcacaacgttcatctttgctacttcttctaaaacgactgcgttcatgactgcactttgagcatctttgccccaagtgaatggaccatgtccctgcagcaagacgccgggaatctctaaaggttggataccgcgttcctggaaagtttcaacaatcacgtttccagtctctgcttcataaccacggtcaatttcttcctgtgtcaaaaagcgcgcacaagggacactgccataaaaggtgtcagcgtgggtcgtgcccattgccggcaaatcaactcctgcctgtgcccaacttgttgcccaagtggagtgggtatggacgatgccgccaatttctggaaccgctcgatacaatacagcgtgagtaggggtatcagaagaaggattcatctttccttcaacaacgttcccctcaaaatcgcagaccaccatatcactagcttgcatcgtttcataatcaaccccactaggtttgatcacaaatagttgctggctgcggtcaacggcagacacattgccccaagtgtatttgatcaagccctgttttggcagagctaaattggcttggaagacggcttctttcaattgttctaacaaatgactcacctctatttttgttttaaatcaatccatcgatcgctgcttgctcgatcggcagaccgtgttggtagcgcttaacaaactcagtaaaaccaactatatcctcaggtaatggcgctaaagttgtcccttcttttccttggaaaactctggataaaaagactgtaagtgtttcttctaccgatttttttttcataaatgctgccagtaaagcgatgccccaagcaccaccttctcctgctgtttccatcaccgtcactggtgcttccatcgcagcagccaacacccgctgcgcaacagtcggagtcttgaaaatccctccgtgtcctacgattcggtcgatcttgacttgttctttagttaggatatccatcccgatcttcatcgcaccaaacgcactaaacaaatggagccgcataaagtttgctaaagtaaagcggctttctggggagcgaacaaacaatggtctaccagctgctatttttgtaatattctctcctgagtaatacccataagacaacaacccaccacagtcaggatctcctttcagtgcttggttgaacaatgtcgtaaacagagcttctgtgctcatttcgacccctgctgcttctacaaattcccgaaaaactttgacccatgcattgatctccgaagtacaattattcgtatgaaccatgccaactaaatctcctgctggcgttgttaccagatcaatttctggatagactttagagagaccgctttcaagaacgatcatagcaaaagctgatgttccggcagagacattcccactcctttgcgcaacactattcgtcgcaaccattccggttcccgcatctccttcgggtggacagaatggaatacccggcaacaatgttcctgttggatctaaccgcaaagcacctgctgccgacaaagtgcctgctgcttcaccagctactaagactttgggcaaaatatctgctaactgccaaggtaaattttctggaaggatcagatcatcaaactgggccatcatctgtcgatcatagtctttttgtaggctgtcgattgggaacattcccgaggcatccccaataccgattactttttcacctgtcagctgccaatgaacatagcccgctaatgtcgtcaaaaagttgacttccggtatatgcgcttcttgattcaaaatggcttggtacagatgagcgatactccagcgttgcggaatattgtattggaacaattcagttagagccttttcggctgcttctgtgctggcattgcgccaagtgcggaaaggcaccaataactgatcattctcatcaaaagcgagatacccatgcatcatagcggaaaaaccaattgaaccaattctcgtcaaaggttccccgtatcgggattgaacagaagctgctaatgcttgatagctttcttggattccttgccagacagatgccaaagaataggtccagacaccatctaataactgattctcccactcataactaccggttgcgatggtttgaaattgctcatcgatcaagacagctttaattcttgtggatcctaactcgattccaagtgccgtgcgcccttcttgaatcgcttcacttatttgctgctccatttctcttctctccttttgaattttgatatacatgaaatcacgaatggctcatgacggagccgcgaacaatcaattctggctcataataaaacgtttcttccaacgtagttcctgaggtgacccattgtgccgctaaaatccccatctcttcctttgggtgagccagtgtggttattcctggtgaagtcaatgtacttaaaggtgaatcatcatttcctacaattgaataatcttctggtacacgctttccattggcttctaattgctggatcaacccatgtgcaatttcatcgttataacagacgattccagtgatctcattcgattggttcaaccggtcaatcgcttgtgcaatgacagcctctttggtttctgtggtataagtcacgacatcttcagcagcaaatgttttctttgcttgttccaaagctttgacaaaacctttcatccgatatttcccttgtaaatcatcaattttagtgatcagcatcaagtgttgatgctgctgttccaataaataattcgtggctagatagcctgaacgagtgtcattgacacaaatatgaggcagatccagttcttcatagtaggcattgatcatcactagcggaatccctgcttctttcaatgccatgtagtaggccaaattgggattgtattgactgctcttcgtcggttcaacgattaagccatctactccttggtccatcatttgttgaaggcaagctcgttcttgttcatggtcattatttgttgatcccaacagcaaagaatagccttgttcccgcaatgtctgctcgactccgcgcataattgaagggaagatataatccgacagatacgtcatgatgatgccaatcgttttatggctgcgttgcggaagattctcaggttttgaaacgtacgtaccagatcctctttccttacgtaaatagccttcgtttactagcaaagcaatcgcttgtcgcacggtatgtcggctcaaatgatattcttcttgtaatacagcctccgaaggaatcgtcattccttctttataggttcctaaacggatgttttcccgtaattcattcgcaagttgttcgtacttcgttgtcatattaatcccatctttcgaaagttgtccgtacatatagtatatttggaatgcgatttcttgtcaatgtaattttgtaaaaatcaattttttacctgaagcagaaatataatagtcagtggcagcctctgctaaatgcacgattcgatcaattgcaactgttcagaaaagatgaattgctatacaataaatgacaacgacagcaaaggaggttcttcctattttctcttttaaagatattaaagaaaattacccaaacgctgctttgcatccagcaaaatcaacagatccaggaatcgaatcgattccatttggtcagaaattcatctggctgcctactgccgatctatcggcaaaagaaagaatcatgctgcaattaggcagcggtgcactgtttccggtaatcgacaaccgttttcgaccatggtacccgattttatttgaacatcagccgataaatgagaccggtgattatcgcttgttgcaagtgaaatttacgagtgggatcgatttattgcagactgagtggctgcaagagatccagcaaatgctcccccatgtcgtcgacctcttttttgttaccgaagacagtgcgttgattgttgaacagcgggctggtgagaacttgcgcttagatgaactggatggtttatttgttgctttagatatggattttgactgctactcgcatttatttgtagggccgtttcaccattcgagccatgatttcacacttctgctgactgaagaaatgactctttttcaacaattgactcgacaaaccaatttaaaaagtttggatctggctacatctctgatccatttgctaagcactgccggttccgactatcaactattatttcgaacactttatcaggattggtttcaggaaagcgatcttatccatttgatcgagtcgctgtggaaaaatcaaggaaatgccagttctacagccaagtcactcttcatgcatcgcaatacactactttataagatcgataaattccaaagtatgactaatctgaacttaaaagaaatggatgatctgctgctgtgctattttcttatcaaaaatttcgctcatccagccgattgaacaacttgcacaagaaaacgttttttttcttgtgcatatttccgttgctgaatcaaagcgttttcatttatgatacaggtgtaaactaaatggaaagaggtaatcctaatggtagaaatggctctgaaacacgtgcataaaaaatacgacaacaatgataattattctgtaacagattttaatttagatatttctgatcgcgagtttattgtttttgttggaccttccggttgcggaaagtcaacaacgctgcggatgatcgctggattagaagatatttctgaaggagaattatccatcggcggcaaagtaatgaacgatgtcgcaccaaaagatcgtgatattgccatggtattccagaactatgcgttgtatccacatatgacagttttcaacaacatggctttcggattgaaattacgtaaatacgataaagaagaaatcaaaaaacgggtagaaaatgctgccgagatcttaggattgacagaatatctagaccgtaaaccagccgcactatctggtggacaacgtcaacgggtagctttgggtcgtgccatcgtacgtgatgccaaagtcttcttgatggatgaacctttgtcaaacttagatgcgaaattgcgggtagcaatgcgtgcggagattgcgaaactgcatcaacgtcttgaaacaactacgatttatgtaacccatgaccaaacagaagcgatgacaatggcagaccgaatcgttattatgaaagacggatttattcaacaaatcggttcaccgaaagaagtgtacaactcacctaaaaatatgtttgttgccggctttatcggttcacctgctatgaacttctttacagttactttgaaaaacggcatgatctcagacggccatggattaaacttacgtattcctgaaggcaaaaacaaagtccttatcgaaaaagggtacgaaggcaaggaattagtctttggtatccgtccagaagatatccacagcgaacaaatcgcattggaagcttcaccagaagcaactgtccgtgcagaagtagtcgtttctgaactgcttggtgctgaaacaatgctttatacaaagattggttccactgagtttatctctaaagtagatgctcgtgacttccatcgtccaggtgaagtgattgatcttgctttcaacatcaacaaagcccacttctttgataagacatctgagaatgtgatcacgttaccttaatttgtagttttcttgcactgtccttggtttgccccctagacagttgcaattaactaatatccacttttattccttatttgtatcccctgaaaacagacagccctgcggctgtctgtttttgggtggattctctttaggtgaagggactactttgaagctctcttctcaagaaagcgtacataaaattttttgatcgttgggtattgacgatatgccaagaaaacaactttgattcttttagtagtaactgggtcgacatcaatgattttcttatacccgacagttccgcattctgctaaaaagcaatccttgccatctttttcataataaagtactgctttttcaattctctgactctcgcggatttcttcttgtaaaatcactgtattgatttgtgttggttgtgcaaaagtcactgttacccacggctcatgatcgttatccgcaggttgccaatacgtcttctttgatgaggtaaccttctgcaggctttcttgatcccagggtgatttttgggaagaagctgtgatctgtccttggtacaacggctgatccgtttgtaatggccgtagatattgccctaattgcatcagtgactgctgatctttcgggtggatcgccccattgggcattggcggaacatttaataaaaataccgcgtttcctcctaccgctttccgatacaaagaaaataatgtttcggcacttttcactgctgtatcctcttccggatgataaaaccagccgggtctgattgatagattgacctctgcgggataccagactaaatctctgctggaatcgtagtttctcaatacagatcggctacctaaatcttctgccatacttgagattgtcgtccggaattctgctgtgtctgtttgttgtgatttttcggccgtcttttcggcatccaatagctcacggggaacgacactccactcattctgccttgtgtgcccggcttcatttccgatccagcgaacatctggaccgcaaacggcaatcacagcatccggctgtaattgccgaatctgttgataatatctttgccagtcataaaactgccgctttccgttaggtccttctccattggctccatcaagccacacttctgctatttcaccatactgcgtcaataattctgtcaattgacccacatacacctcgttataggcctgtccggtgccgtagcttgcggcgtgctgatcccacggagaaagatagatgccaaacgccatccctgcttcttgacaagcctccgacaattctttgactaaatctcctttgccatttttccaaggtgtataagcgactgtctgctgcgaatagttgctgggccataaacagaagccatcatggtgcttacaggttaagatcatccctttcatcccgctgcatttgcaaagcgtgacccactctttacagtccactgcttgcgggtcaaatagtgctaaggattctctcccatttccccattcccgattcgtcatggtattcaagccaaaatgaataaagccataaaattcccgtgcttgccatagtagttgacggtaactcggacggatcgccgtcaattcttcaactttcatcgcacttcccctttctccaactgattgtcagcaaactggaacccattcagataagtgttcttactggcgatggctcactaaccgcagttgttttgtttttggtctttacagcaaatagagtagtagatgccaaatgaattgacaagccactactctaaattacatagtttagtttgtttcacatggttttttcccaaaggttgcgttcaggattgcaacaccagaatagccgagaactaattcaactgcaataatgttaaactatctgctaagaccgcttcaccatcaagaagctcgtaatcttctggtgtgattagtttatacggaactgctttatagttcaaaaaatcttttaagcgattgatttcatatttcgattgtggtccaatcagtaatgcatcaacagtctgattttgaatgatttgttcagcaatgattgctggtgctgaataaatatggacagttattccttgttcatccgctgctcgctgcatgtttttcactaatagacctgttgtgatgcctgctgtacagatcaataagatcgtcttttgtgcttctgtccccatatttacagcctcctaagatattttctttttcttattatagatatctaagacaactgctaacagcaagatcaatcctttgattgcctgttgccagtcgacccctgcacctagaatcgacatcccattattcagtactcccatcactaatccgccgacgatcgcacccatgatcgttccgattccgccagaagttgaggcaccgccaaaataaacggcagccatggcatccagttccatagaggttcctgcttatgaccagtcttagcgcctgccaacgaccagctgaggggaccaatgaatctgctaaagagagcattgtcattggcttttcgcaatctggtacagaaagcagttggcgtaaacgtcatactgaatcgattcggacagagttagagaaagaagggtatgaagtactttatcgaaatggctatatgaatcaagaaagacagatccaagatatccgcagttttatcgtttaccaagtagatgcaatcgtctttactccattacaagaagatggttgggaaccaatactcgaagaggcggccaatgcaggtatccctgtttttatcgttgatcgtcatgtggatctggcagatccttccttatttttgacacatatcggtcctagtttcaaagcggaaggcaatcgagctggcctttatgtcagcaattatttcaagcatcatgaaaatgaaacgatcaacgtgctggagttgaccggactcagtgatacatcccctacgcaactacgttcagatggctttcgagaaaccatcaaacgagattatgcgaaaaacaatgtcactattcaagtaactgatgccttgaatggcgacttcattcgtagaaaaggcaaagaagtgattgaacaatatattgcagaaggaaaaatggccgacatcgatgttttattcagtcataacgatgaaatgactatcggcgcgttagaagccttgaaacaaacagatatcgtccctggaaaagacattgttatcgttacgattgatgctcaaaaagaaatgatcgacaatttgaaaaacggcatcgttaattgcgttgttgaatgtaatcccgatgctggtatcttcgttaaaaatgctatttcccgttatttaagtcggggcagaagtgcagttccaaaagaaatctatgtccacgagacagttttttcaagtgatatggattttgaccagattccaccccgaaattattaaggagtcattcatgaaaaagacaagtataaagggcatcttccaacaaaccaataaattgatgatcttagtcgcttttcttcctttattgatcagtagtatcttttattcccgccaaatttttatttatcaaaatacgatcaacaatattgaagaagccaatcagctctcgggtaaagtggatgcaattgttttagaagaaatgtgggatcttgtctttggccaaaagagcgtggcggatgttcaagtcaacaacgtcattgaagaattgcgcgcggatcttgaccatatccaaacaaatacgaatacagccaaagaaaagaacacgttggctgttgccttacgtacactggattcattagaaacctaccaaaacaagctcatcgaaaatattgctaacgatgaaccactagaaaaaaatcaatatgtgatggtccaggtggattctgtgattgaattattgtctgaaatcctccaggaatttgttcgtgtagagattagtttggcaagtcaaaccaatcaagatttgattcaatctgtcttgttattgatcgcttttcaattgcttttgattcttttgattatttactttatttctaaaaatcgccgctttgttcgcgaaaatctccaaaatccattggatcgtctagtcgaattatctgatgaacttgcccaagggcatctcggctttcgagcagtcctgcctgatacaccggaattgcgcacattgacgagcagtttgaataaaatggcggatgatttaacccgtttattagaagagaatgctttgaaacaataccatttggctcaaagtgaagttcgtgtgttgcaagcacagatcacgcctcactttatttacaatagtttggatgcgatcgtctctttgatcgaagtagaacgatatgaacaagcaactgaaatgacgtacgccctctccgatttttttcggatttcactaagcaaagggcacgactggatccctctttcaaaagagttgcgccatgttgctgactatttaacgatcctaaagatccgttatggggagatgctgacctatgaaatcaaccagcagaccacttcccaagacctactagttttaaagatgatcctacagcctttagttgaaaatgccgtctatcatggcaccaagtttgtacgccgagtaggaaaaatcaccatcacgattcaggaatatgaacagacaatccagatgtctgtccgtgataacggtattggcatttcccacgaacgattaatggccatccagcataatctgaaagaaaatacagatcccgatccagaaaatgggtatggtctttataatgtttatcgtcgtctattactaaattacggtagtgacgtacaatttgatatcgcgagtattgaatcacaaggaacaacgatttcgatcatcgttcctaaaaaaggaggagcccactaatgtacaaagtcttcatagttgaagatgaacacctgatccgtgataacttgcggcatcagattatttctctagctgaaaaataccccattatttatagtaatgaagcggcagatggcgagttggcacttgcatcgattcttgacattcgtccagatatcattttgacggacatcaaaatgccttttatggatggactgacctttgccaaagaggccaaaaaattattgccacttgttcgaattatttttattagcggcttcgatgattttgattacgcaaaaacagcgctacaattgcaagctgatgactatttgttgaaaccgatcaaaaatgaggaccttgaacagacattgattaaagtcattgctgcattggaccaacagtcccaagaacaacactatctctcacaagatgatgaactcctgcgaatggaggtcagaaagaatctctttttgaatactcttttcgcaagtaaaatcacaatttcagaagctttccagcaagcgaccgagctaaagcgttccttttctggtaaacaattttgtgtcttgttggccaagacaccatacaatcagaatttttcggattatacccgcttcagtaagcagttgacttctacttatggttccgatgaaacagtcttattctccagcatttccagtcgcttcatcaaattcctgctttttgatttcaacaaagatgctgtactcgagaaagcctaccaaatggcacaagcgctcacccatgactcaagtgaggaagtggcagttgccatcggaccggtagttgagcggttttcggacattccaacttcctatcacaaagccaacgggatgttgaaaacgtatggcggcatccgcaaggaaaagatcattagctatgaggatgatatgaaagaaggagaattatctcctacgaatcctttcaaaatcgaccttgccgaacgaatctcccagactgagccagaggcgatcaatgacttagtcaatgaaatcatgtccgctcaaggaactgcagaaagaacccaaatgtatcgtttttttgttctggtagaattgattgcgctggtaaaaaagcgtgaaggcaaagaacaaaaggacttgctagctcaaactgcggatttagactatttatcccaactgacaagtgagccacacaactactaagacaaagtgactgcactgcttacatacttagtcaagcagcaaatcaatccggcaatggcaaagtatcaaagtgtgatcagtcaggcaaaacagtttattgacaaaaatttttctgatccaaatatttcgttgaatgtcgttgcagaaaaagtcaacttgagccccgcccatttcagtacgattttctcgcaagcaaccgatgccacattcattgaatacctcacagaacagcggctttcattggcaaaaaaactactgatcacaacaaatttgcgcctttccgagatcgcctttgatattggttacaatgatccaaattacttctctttcctattcaagaaaaaagaacagatttcacccaaagagtatcgtcagatccaccattgacagaagttcaaaaaaaccagcccaaccttatacataaggctggactggttttttaggctagcaaataatgcaagaagcaaaatcgttgaacgaacaaaatcaatactggcgtcttgccttcagccgttcgtcattcttttttctccatcgccgcttttaatgctgcagccaatggactttcttgcggttcttcctgattgatcttttgcatcaaccggcgttcttcatgtttggtcaattttttgttacgctctttcttatctgccattttctcggtgatcccatcgaacttgcaacggaagaaagcaccattctttccttcaatgatctccatctttcgatgacattgtggacagcgatggttagacactttaggatctttacgacgacgatacttacaggtttgacttgaacaaacatagatcttgccatctcgggtactcttttcccttaatggttccccgcattcaggacatcgtttttgcgttaaggaaaagtcttgatatttgctttcgctttgcttgatttctttgactaattgcttggtatgtttttctatctgagcaaggaatttttgttccgagtattttcctttagcgatcagttctaattccttttcccatttctccgtcaattccggagtgactaaagatgggttgactagcaccaacaactgcttgccttttggcgaaacttgtaaaccgctaggtgttcgctccatcaactctgacttgatcaatttctcaatgatctcagctctcgttgcaggcgttcctaagctatgtttttccattttgcctaagagcgtaccttcattcaatggtttcggcggcgtcgttagttccttttgaatactgaatgttggtttgacactcatttgttcctgccaagaaacagtggttgcttcttcttttgactttttccagcctgcctcgatcacagtgttatgggtaaagacaaacacttcattaccaaatttgactgtaactttttgctgctgcttcttatgcggtttggcaaaaagcatcaaaaaacgttcaacgatcatttgatagattcgctgttcgtcattactcaatttttcataacgtgcccgttgctctgtaggcaacaaggcatggtgatccgtaactttcttatcattaaacacagcttgctgctgaacttgaccgctatttttcaaatagcttttgacttcaggagcaaaatcggccactgcttgcaaccgttctttcatcgttgctttcatgtcactggttaagtattttgaatcagtccgcggatacgtgacgattttatgggtttcatacaagctttggaccaatgacaacgtttttttggcagaaaagtcatagcgatgattggcttctcgctgaatctccgtcaaatcatagggtaaaggagccgcttcggttttgatcttctcttcaatagacgcaacacggccattttgctgactcatcttttgaaccagtgcttcggcttcgctacggtctttcaattgataaggattgctttgttgccgctttgctttactgtcgcccacttctaagttgatgacataataggtttgggggcggaaaccttcaatctgtttctcttgtgcgcgaaccaaagcaagcgttggtgtttgaactcggccagcgcttaaattatcctgatatttcactgttaaggcacgggtcacattcaagccgactagccagtctgcttttgcccgagcaatggcagaatgatacaagttatcatactgcttcgccggctgcaactttgagaacccttctttgatagccttaggggtctgagaggaaatccaaagccgcttgacaggtttgtcacagcggacccactctaagatccatcgggccaccaactcgccttctcgtcctgcatcggtagcgatcacgacttccgacacatctttgcgatgtgccagttgtttgattgctttcaactgatgccccgtcttaggcaatggtttgatcccgatcgttttgggaaccatcggtaatgtttccatctgccacgaggcccattctttgtttaaatcttcgggcatttttagacctaataaatgaccaagggcccaagtaacgattaccttgggtccttcgtaataatttttatttttttgattacaacccaatactttgctgaggtctttggcaacgcttggcttttccgctagaattagttgtttcataaaaatctttcctgctttcatcgacgacttgttggtattctttaagtagtgccaacccaatatattgttggagataatcgtcgcattcttcacaccagcgttcttcgtcttcattccaaaaagccgtcataaagttggtttttgcatttatgtacgaatactctttccgaatctcgtgccatttttcttcgtaaaatgactgtgcttccgcaaaagatgcaaatgtgaacgcctcttgaatatctgcctgccatccttcaaaaaaccaccatggctcgttatcaccatacatgactattacttgatacatcccatcgctcctctcaagattcctttcccatattagtcacttttaccaaaagttgcaaggaataagtctcaacaattaagcaccctttaaaaaattcaaaaaatcatcgtttttttatgtttttatactgtctcttaagatgacatcaaaatgatgttacccttagtctagcatagaacacagggaatgtgaatataacaagaaaagataacaactctacataggtgaaattattttacttggaaaatttttttatggcaagaacaattatgttacactaaacaaaaaatctgttaggagttggcgcgttgatgtaccttaatcaaattacttttcctgatcgtgaatccgaagggtcattttttgcggggattatgcgaactgtctatgattcctattacccctatcaagtcttgtcaaagaacgccttttctcaaatcgattttgaaccaatcactatcctttacggaggcaacggttcaggaaaaaccaccgcactgaacgtccttgctgagaagatcggcgcgcaacggtccgccgcttataatcgttccaacttctttgaagattaccttgatcaatgccattgcatagttaccaacgaacctaaaatcaagcaaattttgaccagcgatgacgtattcgactatatgctcgacattcgcaatttgaatcaaggcattgatcgccgccgagaagaaatcttcgacgaatattttgaagccaaatatgcaaattttcgttttaaaggctttgaagactatgagagattaaaaaaaatcaacctcgcacgttccaatacacaatcgaaattcacacgtaaaaatctgatggataatgtccgtgaattctcaaacggagaaaacgcggcaagctttttccaagaaaaaatcgtgcctaatggactgtatcttttagacgaaccagaaaattcactgtcggcccaacgacaaattgagttagtcgcatttatcgaagacatgacccgctacgaacattgtcaatttgtcatcgctacccacagcccttttgtcctctccatcaaagaagcaaagatctacgatttggatcaaaagccggtggatgtgcgtcgctggacacagttggaaaatgttcagacctactaccgctttttccaaatgcatcaagaagcttttgaagatgaaaaaagacgtaccgatcaataagaatctcctagaatcacatagaaaacgatccgaaagatcatgcctgcaaatccatacaggcatcactgatcattcggatcgtttcaattatcactgctgcaatcgttcgaatcgtttagacatattgcaattcttttgcttcttggtaagcggcatcgatcaagccaccgccaagacattccatgccatcataaaagaccactgcttgtcctggggtgattgcccgaacgggttcatcgaagatcacttcggcacggtcattatctagcaagcggacagagacgccgacatcttgttgacgataacggaatttggctgtgcacttgaattcacttggacgatccgtgtctgtcgtaaagtggatttgacttgcttccaaccgatccgcatacaatgctggatggtggaatccttgtcccacatacaatgtgtttgttgctaaatctttgccaacaacaaaccacggttcttgtgaagtgccgccgccaccgattcccaatccttgacgttggccgatggtatagtacatcagaccatcatgttgtcctttgacttcaccatctaatgtgaccatgttgcctttttttgctggcaagtaattgcttagaaattgtttgaaattcttttcaccgataaagcaaacacctgtagaatcttttttcttagctgttgctaaaccagctcgttcagcaatggcccgtacttcagatttttccatgccgcctaaagggaacatggttttactcaattgtgcttgcgacagttggctcaagaaatacgtttggtctttgttgctatccactccgcgcagcatatgggtaaccccattttcatccgtttcgacttgagcatagtgtccagttgccacataatcagcaccaagatccatggcataatctaaaaaggccttgaatttgatttctttgttacacataacatctgggtttggtgtacgtccagctcgatattcagctaagaaatattcgaaaacgcggtcccaatattctttttcgaaattgactgaataatagggaatgccgatttgagctgctactttagccacatctttgtaatcttccgttgcagtacatacaccattttcatcggtatcgtcccaatttttcataaagatcccgacaacatcatacccttgttctttcagcaaaagtgctgttaccgacgagtccaccccgccactcattccaaccaccacacgggtgttttcgttagacatgatttttcaccatcatttcaattatagattctgaaatcatctacgatttgaaggtcgcaacttttcagtaatttgcattatacaacagattggcaaaaaattcacggagagtttcatcggtttagcttttcctgtaaaaaacttagatacttctttaaattcaaaaaaacctttcccacataaatagttcctccgacagctgctgcttaagcctaatgctagcctgctttcaagcaaaaagaaactatcataaaatcgtatgaatttcttcataaaatacagaaatgtctgttgcaaggatcagctatactcctcttagataatgacaaaaggggtaacagaacatgaacaatcacgcaacgactgaccgcagaaatagaaaaaagccaaaaaattccgtcaaaaaaagtattcttgtcttactgatcattgtcgccggttctttccttttacgacaattagtctttgaaagagtaaagcattccgactcacaagacatcgtattattgccaaagaaattttcagagcaagccaatcaagtgctgcaagaagtgctgccgaagtcccaacaagtccctttgattttgcaaagagacgaacgttgggggatgaaacgttacggctctggggaacagcaaaatacctttgccgataatggttgtgccatcgcatctttagcaatgattgattctttttggcgaaatcaggcaccagaaccagacaatattctcaactgggcaggcaaccaattttatcttgctgatcaaggaactagctggcaaatctttcctcagtttgccgaacattttggctatcaattcttagatctgggaaattctttcgaggaagcttacaagatgattcagcaaggatttcccgtcattgtctccgtacagccgggaacatttactaccacaggccatttgatggtattggctttgaatagagaaggggggattcaagtgcttgatccaaatgattcaccagataaaaaccactacaaaaaaactttctctaatgaactgcttgctgctgaaggattgaattattggtgcttttggctttgattttcaaaagcaacttacagacttgcactgttgactgagaaccatcaaaaaaaaacagactagccgattagctagcctgtttttatatttgccgtaattattgaactcgtggttcgttgttttcttggatacggctggcagttttgttgaatgcgcctttggctttacgtgtttgttttgaagcaaattctccagttgtttctgcagcactgctaactttgtcttgaacagtttctgaatctttttcgaattgttcacgagttttaacatctgctacattaacgttcacttcgataacttccaagtttgtcattttgttgacttgtgttgaaacgacttctttgatttggtcgtaaatggcagtcatgtcgctaccgtattctgctacgatatctaaatctacggctacttgttttttaccaacttcaacgttgataccggaagtaacatcatccgtattcactaattttcctgcgatatttgagaagaacccaccatcaaccgttaatagtccatctacggattctagcgcaatcccgacaatcttttgaattactttatcttcgtaagtcaattctcctttaacacctgcagtagttgttggttttacttgattttccattgtacattcctcctatatcttcataaaaattataataataaatgttaccgatcactaacgccgcggcttttgaaattgatcaaagaaaccgatctctttgaggtagaagccaaggtaacctcctagtgctgtaaaaatcagtagtagcaatgttttcaaaaagccgactgtcagaaagagaattgctagtatcagtcctaatgcagcaaagataaccgggatcttattttgttcgaaccatttgttcatcatttctcctcctaaacgacacggggttgtgtgtgatgttctcttgtttcttcagcgtctttcaagacaacttctgtttgtatatcatgagtgacaccgaatagcgtttgaagcttactgctgatctcaccaaccaatgcttcttgttgttgcgggatggctgcggtctgtttcatttctccatcgatcatgactcggactttattcttgataatcttgaccttcactgatggcgaatggataaaatcagcttgttggacattctttaaaacaaaatgttccaaggctttcttttgaatcaccaattctccggatttttgctggataaccaaacgatccgaacgctttggaaagaacaagacaacgaaaataccaatgatcgtcagcagtgcaaagccgacacatgtccaaaacaaaaacatgctcatggaagctccgacccacggatactcacgcagtggaatcaagtagaatggtaaatctaccgcttgctgattctcaatcatgccaaagaaaaagacgagcaacaataacagtaacccaatgatcatgatcactttagaaatcttacgcataggcaacctcctttactactttctatttaaagcatacacatttcttaaatatccttcaaatgataaaccttgaaaccgattattttttcattctatgaccaatgttcagcttactagaagcagaaattttgtcttgctattataactattgttaaaaagatatatgactataattctttaaccgactgttttccttgttatttctcaatgaaacgtttggtgtatttctgcttgtttggcttgaaagatcctttctaattggttttcggaaattggtcgtccaaacggccaaggttgaggaaggaatgctaattccggcgcatcgacaccgacattgatattctcagcgataggcaaactatgatgatggatatgcccatgaaggttacggctattctttgtcattcccaatagcatcggataatgactcaaataatactggtgatgatcaaattttaacaacagaccgacatccgcaaaagaaaacttcggctctccggaaattccgggatcgtgctttgctagataacgaaagagtgcgcgcgtatcatggttgcctttgataaaagcgatctttccttgcagccgtactaatagcgctaaaagctctgcaaaccccgcttcatgttcgggatggagtgcaatatctcctagatggtagaccgtatcttgtgcttgaaccacctgattccaattagcgaccatgacttcatgcatctctgagacagacgcaaacggacgtggggcaaaatcattcgaacctaatagtttttcatgaaaataatgagtatctgatgtaaaatagcgcatcttctcttcctttctcagggtaaatgttttacatatctgtcagtatacgcttagcctaaaaagaaaacagcaaacaaaagccatgattgaagtcacgatctttccttcaactgtaacaaaaaaacaaccgaacgatttcatttctgccaaagagcaagggacaagtcacaacaacatccacattgatagtgtggaaccgctaacgtagttgattagcgctagcctccacactcgctactgtggacgatccaacattgtccacggaataatttgttcatgattgtcttccagatacacttttgaaacgaaaatcttttggttgcttttcctaaataacggatcattttgttcgcgatggtttacgctttgatgaataatccgcgactaataaacccatccatcaagaaataaaatttttcttgcagcattttgtgttgcgggtctttaaagatgttgactgctttcaatccattggctgtcgtaatcgacatcttaaacgttttgatgtcctttgcgacggtaatttttaatttaaagccttctttactttgcggagttgcttccaacccgcggatcagttggaaattgccactgtttgtttcagtaaatccattgtcccgcagtgtatacttttttgcttctggtgctaattggtagcgggtctctgcacctaagacagttgttgttgtttcaaatgccatttgctttccacctcgttcgacgttttgatttccgaaaaagcttctctagaaaaaatacaagtgcttttttctagagaaagtctctttgctatccggtatttctttcttcagattatcatgaatggttgcatgagtgccagtttttttttgctttctgctctcttttcgcttatctaggagcagccccttcgattcctctaaaaacacgaaactatgggtactacttcttcgttcctaaaacggttcgagcaagtaattctgcaaaactatggacctcttcttctgtgttaccaagaccaaaactgatccgcacagattctcccacagcgggatgctctttgccatacattgcttctaaaacatgagaaggttccacgttccctgcggtacaagctgaacccgtcgagatcgcaatgccttttagatccaatttcatcaacagtagatcactagtaacaccaggaaattgcagattgatgatgtgaggcagcttgctatcaggatctccatttaaacggtagtcaacgctttgctcttccaaaacagaaaaaacttgcttagcaaattgctgatacgtctcactgtacgcacgctgtacttctggagtcagcaaggaaacagcttttgccatacctacgatccctgccaaattttctgtaccggcacggcgcttttcttcttgctcaccaccgtgtaagagagtgggtagtgacaagccgtctcgtttgtacaagaaaccaacgcctttaggtccgttgatcttatgtgctgaaatactcaacaaatcgatgccatacgcagcaggatcaatgggcagcttgccgtaagcttgtacggcgtccgtatgaaaaacagcggcgtgttcttttagcagttcgccaatttcttggatcggcaaaatattgcccgtttcattattggcgaacataattgaaacgaggatcgtatctggacgtagtgccgctgctacttgttctgataagagctgtccttttttatcgacaggtaagtaagtgatctcgaacccttgcttctccaaaaacttcatgctttcgatgactgctggatgttcgatcgtcgtagtaatgatgtgttttcctactgcttgttttgcatacgcggtgccgaggatcgctgtgttgtcgctttccgttccgccactattaaaaatgatctcgtgggctttgacacctaactgatcggcgattacttgtcgcgcttcttctagcttggtatgggcatcccgaccgtacctatggatactggaaggattgccaaaaaatgtcgtcattgtgtcattcatggctcgaatgacagccgggtgcatcggcgtcgttgctgcatgatctaaataaaccattcgtttcacctatcctttattaaagccattataacaaatctaaaccaaccgtctatccctaacgattgattttccggtagtttaaaagaatagcaaaaaacagcaagcaggttttcttctgcttgctgcgaatgatttggttcttcaatgtatttttttagaaaaagtaatcacttatgcgttctcaccaggttcagaggcgatcaccgtcagttctccctgtaatgtccattttttgattggattaggcagaatacagcttgttcccatcttcaattcataggaatgaccatcgatcacaagttgaccatatccgtcaatcacggtcatcagagtatagtctgcttgttgttccagattcaatttgccacgaacttcccattcataaacattgaaaaattcggtttccagatacgtcacgattgccgaagatccttgcttgatttcacgaatcgacagttctggtgctttagcgggcacagtcgtcacatcaacagattgttggatatgcagttctctggtcttgccttgatcgtctgtccgatcatagtcataaacccgataagtggtatctgaactttgttgtgtttccaaaatcatgatgcctttaccgattgcatggatcgttccgcttggcacatagaaaaagtcgccttttttaacaggaactttcgttaatagatcatcccaacggccgtcttcgatcattgattttaattcttctttggtttgtgcgtggtggccataaatgatctctgccccaggttctgcatcaatgatgtaccagcattctgtcttgcctagttcaccttcatgttccatgccgtacgcatcgtctggatgcacttgcacagatagatcgtcttctgcatccaagattttgatcagcaaaggaaataccggcgcctccgaatgaccaaacaattcttggtgatcccgccataagtctgctaatgtcttccctttaaatgggccgttttcaatcacgctgacaccatgaggatgtgcactgatcgcccagtcttcaccgatcttatcatttggcagatcaaaaccgaaaacagaatgtaaacggctaccgccccaaattttttcttgaaaaacaggtttcataaataatggttccatagttgatcccctctctattgattcgctaatattatagcacgaaaaacttcaacgaacggattcttttaaataactttgtacaatttgatcccgatgtttcagatagctgtctctgtgatcctctggatgtacgcgattcgaaagaaaaataaatgctttgccatcagaaccaatcaaaaggaaggtccctgtataccctgtatgatagaggtgtacaggcgtacctttcaagtcccagccgattgagcgatgtcctgtttcagatggcgtatggtctagatatagtctttccagtatatctgctgaaagaaaagattgcgtcgctgtctgacctttcttcaacatcatttgtacaaattgagtcaaatcatcaatggttgaaaacagccctgcgtttccggcatgtttgcccaaaactcgtgctttgggatcatgggtgattcctttcagaacagtcccatcttcttggcgctgagtggctgctaccttgcttgctgccggcaaaggaggaaacccactgttggtcatttctagcggttgcagaacctcctgctggaagatctcggtgacagaacagccaaaaagttcctccaacatgaagcctagaagaatcgtgcccgtatccgtgtactggacttgcttgtcaagctgtggtccgctttggactcgaagatacgcgtgacgcagctcttcagcagacaattgatcgcggcgaggaatccaagtctggatatcggaggtgtgggttaaaagatgtcgtaacgttactttctgatcagtaaaagcaggcaaatagcggaccagagggtcatcgattgctaggactccctgttcccatagtttgagaattaccgtcgtcgtacaaaccactttcgtcaaagaagccacatcaaataggtgttccgtcgtaagtgattctatttggggctgccgagccgcgtagcctaaacaatgagtctccatttgctctccatggatgaatcgataaacaactcccggtaagacgccctcctgttgcttttcagcgattagccgaatcgtttctggatacataccagttcctcctttcgtgcgcctctaaactgttttgattataccagtcaggccctaattgcacaaaaaaatacagaagagatttccagagaaattcttctgcatcttagtggtaaatcgcattatttatttgcaacaaaccaccattcgatcccgatggtatcgtaggtagtcagtaagtttttctttttatcaataaagaattcttgcttgctgtcagtcaaatgagcttccaaagtcaataagtcttctttatcaatagcgatcttcaaaaagtccaatcccaatacctcatgtgtcggtaaatcgatggttccgccttggccttcgatcaaaccaacttgaaaatcatcttcattcaaatgtaagaaaccatctgcttctttggtcgtcaaacctaacagctcttccaaaaagtcgcgttctttcgctacatcactgacattcagatgaatttggttgaagcgagctttgcttgataacaggactacctcacttggtgcagcttcgatcaatgcttcaagcgtttttggcaaatctgtttcttgagtgccttcgtaaaaaacttcgattcggttttcttcaggatcagccaaaacaactgcgatttgacttccttcaaaaatagattcttcaaaagtcgcagactgttctttcgcttttttacaaattgctgccagttcttctaaggaagcgacggtcaagcggatccgttgcatttttttgatttccccaaaatgatcattggcccgtggactttcttctagccagatgacttcaccttctgcacctttgaaacccaaaatggctaattcgttttcttcccgtttcaaatcaaaacctagaacatcacgataaaaagcaatcgctttatcccgatcttttactcgaatcgcgattgtccgcaactttgtgctcttccccaatacaaaatctgtcattatttctccccctatatatgtatgcgtttatctatgcatttgtccttattgtactgataaaccgttatactagcaaatgaaatcctttatcattctaccattatcaagcatttttttttgacaaaaaaatagatttaacgacaaaaaaggtcactgaacttctttttttgtggttaaatctacctttattcattgaaggaaggctgtttctttcattcttctgatctgagtaccgtttttttctaatcggtcggtgatactgacagttgctactccgctcataagcgcttttttagcactgactaactttggcaacatcccgccagtgatcaccttctcattgatcaatgtttttatgtcagtcaatgagacttgctgcagccactgggagtctttcttgattcccggtacatctgtcagcagaatcaatcgttctgctctcagactgctggcaactttacaagcgacttcgtccgcattgatattcagccactggccttcggctgtgatcccaagtggggcaaggatcggtatatgattgcctttgatcagcagctgaagcaactgctgattaatagtcttagccttcccaacatagccaagtgtggcgtgattgatcatttccccttggatcaactgatcacagccagcatttaagccgattgcctgaaatccagcttgctgaaaataagtcgtgatcattggctggacttgtcccagcaaaaccatgcgagtgatctcaagagtttgcgcatccgttaccctcaagccttctttgatctgaatcggcagtgacaatttctgcagcatttccgagatataatggccgccaccatgaacaatcacgattttctttcctagagcttgccattgtgcgacttgttcaaaaaaaacgggggtcagattatctgaagcaacaccacccatcttgatgacaatgatttccatatgttcttcctcctgttggatcttgtggcgattttttgattcttacagccaatgattccgattctattcgtttgatacctccatgagataggcattacgtatgatagagtgcattgattttgacataatcatacgtaagatcacagccccaagctttcccgcgaccggccccttcttgtaaaatgacattgatttttacttctgaggctgtcaagcgttcttccatcagtgtttcatcgtagtcaaggggggatcctcctgcaaaaaccgggatcgccgctaattcgatcgccacattggcaggatcgattctttgtccgctatacccaattgcacaaaggatccggccccaattggggtcttttccatagattgctgttttcacgagtggtgaacctacgatcgttttactgatcatgcgggcagctaagtcggtgggagccccttttgtttcagcttcaatcagttttgtcgctccttcaccgtctttagcgatggctttggccaatgtcgttaagactgtctgtagcattttttgaaattgcttataagcaaatgtattttcttcaatcggcggattgcccgcttgcccatttgccagcaccaataccatgtcattggtggaggtatcgccatctactgtgatttgattaaaagtgacttccgtgagttttcgcagcaatgactgcagaagggacggtgcaatagcgacatcggtagtgacgaatgccaacattgtcgccatgtttggatgaatcatccctgagcctttggcgcaacctgccatggtgacagtgtggcccgcaatctccgtctgaatcacttgatttttttcaacaaggtctgtcgttaaaatggccttctgaaatccggtaggactgccagaatgacttaattgacgaatcccagcagcaatcgttgccatcggtagtggtcgaccaatgattcccgtagatgccaccgccacctcttctgaggccactccggcttgtgctgcagccaaagcgatcatttctctggcatctgctattccttgttctccagtacaagcattcgcattcccggaattcacgatcactccccgaagctttcctgttttcaactgttctcttgttactaggacgggggccgcttgtacttgattggttgtgaaaactgcggcggcacttgccggaacttcagagaacaaccagccaagatcggcttttctttttttcaccccacaatggatgccatctgcataaaaaccttttggtgaaacaattgtccctataatttctttcatgttacacgctccttattctgaactaatcgaattcccaagtatcgttaaggataccaagggatctgtcgtaatccagctgtttcctccagcccagcccatttattgacgttctggattgcttgtccggcagccccttttactaaattatcgatcaccgcaatgactgtcacgatgtgggtcatcggatttaagaccaacccaatgtcacaaaagttggttcctgtcacctgccgcagttctggcagctttcctaacggctgcaagcgaataaatggttgttcttgatagtcttcttgatacctctgataaatatcttccgctgttctttctggcgctacaggcacataaagggtcatcatgatccctctgttaaccggaatcaaactagtggaaaattggatggccgtcaattctggatcccattgttgaaactgctggacaatttctgggatatgctgatgctgattcaatttatatgtctgcatattttctgaaattgtcacaaaatgactggtatctgacagttttttccccgcaccagaaagcccagatttgccgtcaaaaatgggaatgcctgccaaccattttcttctgactaaaggcgcagcggctaaaattgcggcagtggcatagcagcctggattggccattaaatttccgtgggacgtctgaaactctggcaatgcatatgttgcagcatgcaataaacgatccgcagctggcgtctgctgataccattgctgataaacacctgcttctttcaaacgcagatctccggataaatccatcacaggaaagtcttgttcgacaaatggcgagaccaaatctttgctaataccagccggtgtcgcaaaaaagaccaattcattttcttgcataatctgcagcggatcaaacgggtaaatcctttggttgaccagttgctgcagatggggataaacattgactgaattttcttggactgaatgactatgtaacgttcctatctccaagacaggatgcaagtggatcaaacgaaccaattccaatcctgtatagccggtaaacccgacgattgctgctttcacttactacacccctttttcacttgttctcaaattctttttcaacaacctttcaacaaccaaagcagctcttctttcttcattctcacctttcagtggtttcttctttcgttcctaaaacatgacgtagaacagcgagtccttcagccatttctgcttccgttatggtcaatgctggcagcagacgcaggacattcgttccagctttcaacaccagtaaccctgcttgacgcaattctgtcatcgcctgttggagagcagtgctatccttcaactctaagccaatcattaggccctgccctcgaatagccacgatctgtgccagatccgttaagcctgccataagctgctgatgtctggcagcaacatttactaacacaggggaatcggttaggaccgtacatacggcatttgctgcagccatcgctaacaaattaccaccaaaagttgaaccgtgacttccagggccaaacccctgctgtaaatcagtttttcctagcatggcaccaaccggcagcccattgcccaacccttttgctaatgtaaaaatatcaggttcgatcccatattgctcaaaagcataaaaactccccgtgcgtcccattcctgtttgaatttcgtctatgatcagcagtgcacctgcttcttgacataacgcggccaccttttggacccattctttttcagctgggatcacgccgccttctccttggaccagttccatcatcaccgcagctgtttcctcatccaacgctgcttgcagcggggaaaattcattgaagggcaaatactcaaaatctggtacgagcggaccaaaatcctgatggatgctttcttgagccgttgctgtcatggcaccaaatgttcgtccgtgaaacgagccctcaaaagttaaaatctttgtccgacccgttgcttttcgagctagttttaaggctgcttcatttgcttcagccccactattgcaaaaataggcaagatatggaccttttgttagtttttgcgcgactgtctcttgtaacgaattggtgtagaggttgggcgcatgccataatttgtccgcttgctgcagcattgcctgctggatttcaggctgcccatagccaaggttggcgaccccaataccgcttgtaaaatctaaatatctccgaccttgagtatctgttacatagctgccctttcctgcagcaatctctaatggcaaacgtgtataattgggaaacaactgactcatccatcaacgacctcctatgaatatttatgtattaatatacatttttagcaaataaattgcaatatttatttattttataacgaaaatattcattccaacaaaaaaaagagaagcttaacgcttctcttcattcttgtttatattcacaaaaatcgattgaataaaatcgttgtcttcttgtatcaggccgcatcttctgaaaattggctgttatacaagtccgcataaaaaccattcttagccatcaatgtgtcatggtttccggtttcgacaatcgaaccatgattcatcacaataatattgtcggcatcccgaatggtagataagcggtgagcaacgacaaaacttgtccgattttccaacaatttgttcatggctttttggatgagaatctcggtccgagtatccacactagatgttgcttcatccaagatcaacacatctggatcagctaagaaggcgcgcgcgatcgtaatcaattgtcgttgtccttgagagatattgctagcttcttcattgaggaccgtatcatatccgtccggcagcttgcgaacaaagtcatccacgtgagcagctttagcggcttcgattacttgttctttcgtcgctttgtcattgccgtaatggatattgtcatagattgatcctgtaaatagccatgtatcttgtagaaccattgatatgttgctacgaagctcatcacgggtcagatctcttgtgtcccgaccgtcgtagcgaatactaccgccggaaacatcatagaatcgttccaacagattaatcaatgtcgttttaccggcaccggtaggtccaacgatagctaccatttccccagctttgacgtctagattaaaatcggtcatcaataagttgtctggtgtataaccgaattgaacatggtcaaaacgaactttatagtcgctttcttccacgggtaatccagaaggttcatctgacatttcttcttcatccaagacctcaaagacccgttctgctgatgcaacagttgattggatcgtattcaataaactagcaatttgagtgatcggttgtgagaattggttcgtgtattgcaagaatgcttgcacatcccccaaagtcatgttcccattcgctactttgatcccacccagaactgcgacaaagacatagcccaagttcttgatgaagttcatcaatggcataatgattgcggaaatgaattgtgctttccaaccagcactatacagacgatcgttttcttcttcaaatactatttgatcagccgcttcatggttaaaggttttgacaacggtatggccgccataggtttcttcaacctgattattcagtaatcccaagctcttttgttgcgcagcaaagaatttttgtgattttggtgcgacgatcattacgacgatcaagcttagcggcaccgttgctaatgcaaccaatgtcaactgccagctaatcgttagcatcatccacaacactccgactaaagtaacaatactggtaataaattgggtcaagttttgttggagggtgctggcgatattatccatatcattgattgcccgtgacatgatatctccgtttgaatgggtatcatagtaagaaatcggcaagcgattcattttttcttctaaatcacgacgcagttcatagacggtccgttgtgatacacgggtcatgatgaattgttgcaagaaattgaaaatagcagaaataacatacataccgatagcgatcataatgatttgtcctactttatcaaaatcgatcggaaattcggtgacagtttttccagctttcatttgctctgcaccaatcataacacctttaaagatttcggttgttgcttcccctaagatctttggtgtttgaatctggaagattacggcggcaatcgctaaaacaaataccgaaatgattgcgatagaacgtttcgacatataaccgaaaagtcgttttaccgttccccagaaattttttgcttttggtcctttcgctccaatgttgcgccctggaccgccacccatcggtccaccgccgcgaggtgcttggtttttccgttcactcatgccacatcctcctctctcaattgagatgatacgatttcttgatacgttttgtttgaggccatcaattcttcatgggttcctttacccaccaattgaccttcgtcaaggacaaggatcgtgtctgcatccattactgtacttacccgttgtgcgactacaaccataatgctgttcttcatgtcttttttcaatgccgctcgcagctgtgcatctgtcttaaagtccagcgctgagaaagaatcatcaaacacatacacatcggcttgtttcactaatgcccgagcgatcgctaaccgttgacgttggccgccggagaaatttccgccgccttgttctacatgactgtctaagccttcgctcaattctgaaacaaactctttggcttgtgcgatttccagtgctttccagatttcttcatctgtcgcatctggtctaccgtatttcatgttttctcgaatcgtaccagtaaataaaaccgctttttgtgggacgaaaccaactgagtcccgcaaattatgctgtgttacttcagcgatattcactccattgatgcggatcgctcctgattcgatatcatagagccgaggcagcaaattgaccaatgtcgtcttcccagaacccgtaccaccaatgattgccacaaaatcacccgattttgcttgaaaatcaatgtcttgcagtgctaatttttctgcaccgtggtaacgatagttgacgtgatcaaaagcaagtgtggcttgatcaccttttaattgaatcatcttaggtgctttatcatcaacgatctcttcttcttcgtctaatacttcattgatccgatctgcagaggcttgtgctcttgggaccatcacaaagatcattgacagcatcataaaactgatcaagatttgcatggcatacgtcatgaatgcaatcagattcccaacttctaatgtcatttcagcaatataatgtccaccaaaccaagtgatggcaatattggtcccactcataatcaatgtcatcaaaggcatcataagtgccacgatagtatttactttgatggccgtgtgggtatagtctttattggcttcatcaaagcgattggcttcatacccggtcttatcgaaagctcgaatgacccgcactccagtcaatccttcacggaagaccaaattcagacggtcagtttttttctgcatgcttttgaaaagtggcacagcaaaatacatgattccaccaaccaaaacgatcataattggaataacgactaaaaagattttggttaactgagcgtctttttgataggccaagaagcttgctccgatcaaagtgattggtgcattgatcatcatccgcaagaacatttgtgccaccatttgaatttggttgacgtcattagtcgtacgagtgatcaaagaggcagttccgaatttatcaaaagaacgtgcggagaaattttctactttttcataaatatctgtccgtaatttttgccccaatttttgtgattctctagtagcaaagaatgtattgcctaatgcagccagaatactgatcagtgaaaaaccgatcattaaaaagccggtacgccagatataatcaatgtctccagttgcaacgccattattaatgatattcgacgttaatgtcggtaaatagagatctgctattacttgtacaaccataaaggcaacggccatcagtgccgaaacgagtgaaactcgtttaatcaactttgtcattcttttcccctctttctttttgtgcgccatctcttagccagctgattttgttattgaaatcagtcgttgctagcgaaggatcataggcatgattttctgctaactctcggtatgcttcagcaatcgtagaaaaaacggtgtgcatcaacagttggacgagcattttcaattcatgatcatccttgacccgtaataagtctttgtcgatctcagcaaaaaattcttcttcccacttctgtctcgcttcttgatgctctttgtgagagccgtagagtggttttttgtggatatccggcatcacttttcgcaaagaacgataatccatactcatgaagagattgcgataaaattttgcattttttccttctaacacttcttcgatcatccgagaaaaataccattcaaagccagcaaacagatcgcccttttcgtgttgaatggaacgaatcaaatcccgctgactgttttttttcaacgtatgaaaatagtagtagtataagtcttccttattttcaaaatactgataaaaacttccccgagggatttctgcgtctttgatgatattggcaatcgaagcatccttcaatgggacccgagaaaattctttcttagcagcgcttaaaatgcgtttttgcttatctaatggcaaatggaaaaacgtatccgttggcatcgtcatctctcctttcagttcaaatgataaatgacaacaattattatgacaggttgtcatatgacactgtgtcattatacacccctcatgagagaatgcaagtaaaaaagtttgaatattttatgaaagtcattttctttataaaaaggaaattcgcttagtgatttcatttcattgaaaatagattcattgtctttttctgaaaacaaaaaaagcagcggctattccttaagaaaggaagccactgcacaacagccgtttttcgattttaaataacatctattttttctttctaacccacaggacacagcctactccgactaacaaaacgactccaacgactggcaaaaaccaattgacggtctctcccgtttttggcaatgctcgactgtccgaagtagcactagctacttctgttttgctagttgttgtttgttccgacgaagtgttggcagcagacgtatcagaagattcggtattccccgttacttcagaagctgctgggagataatgaccttgattcacagcgtaaatgatccagccaatccgacctggaaacaatgtttctgaaccactggcagctacttcttcatctaagtgtgacaaaatcgatgtcaaccattcatctgaaattggctgttccggggaaatataaacaccatttgttgggtaaacaacttgcagatatgtttttaagcgatccagttctggaatcaacgctgcaaaagaagagtagctgcttggatcaaaggctagctgcggttcaatcttctcccaagctaagagatgatcgataaaaagagcgcgaacgatccgagcaaaatagccgatatccattcccatcacatcttggctatatcgtaatgctaatgtctctgcatcttttaattgctgatcggtcaattgatccaactcatcttgcgtgaaagctgtcacacttccatcaatgatgcctctagtaaaagcagagcgcaaatcactttgttctgtaatggtttctgactcaggacttgcttgaacgcctgtttgagcgacaatggcttctaccacatcctcgggctgtgtcgtcacggattcactactttgtgcagtgtcagcggttgattccatttcagtattcgaaaccgtcgcttctgtcgaaatgatttcttcagttgattgcgtagattgaatcgtttctgatgattccgttgtttcctctgcaatggcagtaattggtaaaaataatagacagctcatgaaccagatactctttttcattcctttacctcctcaggattctcaggatttctttgtaacacgaatgtaacacaatagtaaattattcgcaatgtaaaaaggcacttccttaagaaatttaaaagatattcaatgtcttccgatgcactccgcttcttccctaacaaaaaatcccgaaccacttcagatgattcacattaacagaagcattaacgagatcatcattcagcagtacgggacgaagcgttcttaatcaccgaatgacacatgggtagaaaaaattgtaccattcgaatctagctgttttttaactatttgacttgtacagtcatcacaggactagcacttgtgactgttcctttagcagtcatggtttctgagataacttgttccatattggtgagtaccacaagcatatcagttgctttattgctagctgccaattctgccagatcaacttcagcaacttgtgtagcggcagtcacttgttgcccttcttggacgaggatattgaaaggcttgccttgtagctcaacggtatcgacacccatatgcagcagaatctcaagtccatttggtgtcgtgattccaatggcatgtttggttgggaagatcgttgttacagttcctgcagctggtgcatagatttttccatttgcaggagctacataatatccgtcacccatcattttttgagaaaaaacaggatcctttgactctgtaatcgcatgaacggttccttcagcaactgcatatagttcaatggtttcaggtgctgcagacgttgctggtgttgtagccgtcgttgaagtagccgccggtacttcttcatcaacagcattgacagcagctaaacggtctttaggaatcccaaagaagtaagtagccacaaagccacctgcatatcctgctaataaaccaaagacatagcctaaccaatgaccgttcgcaatcaacggaatcaaagctactccagaaggtccaatggcggtagcgccgatattcgacaatgcgccgataaccgccccaccgattccgcctccgatacatgccgtaataaatggtcggcctaatggcagtgttacaccgtagatcaatggttctccaatacctaaaatccctactggcaaagcgcctttgatcatttcagaaagttctttatcttttcgcagacgaatccacagggctaatgccgcccctacttgaccagcgccagccattgctaagattggcaataactgtgtgctgccagttgcttcgatcatttgaatgtggatcggtgtcaagatttgatgtagaccaaacatgaccattggcaagaaggttgctccgagaacaaaacctgagaatgcgccgccgacatttaatacccaattgattgagccaaccaaactgtctgaaataaacccagctaatggcatgatcaaaaagatctctgccaaaccgatcgctaacaaacacaaagttggggtaacgatgatatcaatggcttcaggaatcactcggtgcaaaacagtttccagtttagccagcaaccagactgcaaagatcacaccgatgatccctccttgtccagctgccagaggatctcctgtaaagaggttggtgattggggcttctggattcattccagtcaataagacgaccgacccaatgacaccacctagcgttgggttcgctttaaatacttgagctgcattgacacctgtgaagatcactaaataagaaaacatcccgttttttaagatatttaaaatcatgacataataattccacgtgtcgccatcgatttttcctgcagtgatcaagttcgtcataacagaagcaataccagcaacgagaccagcaccgacaaacgctgggatcattgggacaaaaatattcgaaatatctttcaataatgacttgattggtgattgtttttgtttcgctttttgagcagctttcatttctgctgctttcgcattcacagcctcttttccactggtagctgccacaggaatttcttgccctagatcaacacccgcttgtgccgccatggcatttgctactttattgacttttccaggaccgatgatcacttgcagttgttcatcatccactactcctaagactccgggaatgttttgtaacccttgcttgctgaccttgttgtgatctcgaaccgtcatccgtactcgagtcatacaatgagtgacagaggcaacattctcgataccgcctgattcttgaaatattttttctgctagttgtgtaactgtcagttcttcttttgccattgattttttcctcctatccttctaacgttcctttaacgaacccttctgattgtaccagctttgcagcagcttcttctttttcactattggtaagcagcataacgatcgctaacttcacattttgatcggctttttcaaagtagtctgccgccgtttcataatctgcttcggtggcttgcatgatgattctcttggcccgttcaacgagtttgtcgttcgttggtttaacatcgaccattaaattattgtacacttttccgatgcctaccatcgaaatcgtggaaatcatgttcaaaatcaatttttgagcagtccctgatttcaatcgggtagaacctgtcagaaattctggtccgcaatccacttcgatcgggaagctggcatgttttgaaatttctgcttgtttgttgcaggcgatcgttcctgtggtagccccgatttcatttgcatagtctagtgctccaatgacataaggtgtgcggccgctggctgcgatcccaatgaccatatcattttccgtcagcttcaggtcaatcaagtcttgacgccctaattcaacagaatcttctgccccctcaaccgctacagtcattgcttcttcaccgccagcaatcaaaccgatcaccatatccggtgagaccccaaaagtagggacacattcagcggcatctaaaactcctagtcgtccgctggtaccagcaccgagatagatcaatcgtcccccttttttgaaagattgaatcgtttgctgaattactttttcaatgctcggcaattccttttcaacggattgagcaactttctggtcttcggcattcattttctgacaagcctctgccacagtcatttcatccaagccaaatgttgcttgatttcgtctttcagtcgttaagttttctaaattaatcattgtcatttctctcatctctttctattttgaatcgcattcctgctttgatttgttggagcaaggggagatcttcttcaatcacttgcgcagcgacattgactttgtcatctgcgggcaggattcgcttacaaatttggatttcccccatatagcgcaagtaatcttgattatcgatagtcacagctccgacaacccgtttttgagcagtttctggggaaatcaatgggacttcagcaaatcgggcatttgcactgcgaatcacatctcttgcctcatcttgccggctctcatgctctcctaaaatatgttgataataggcagaaccaatatcctttgtgcgaagaaggacggtctgatcggctagataagaactgaattgcttcaaagaagcaggggtcacgataccatcaccaatgtagacagcatcaacggcacaatccctcaacaactccagtgctgctgcgaaggggctcatgctgcgatgcgcttccagtgtcggcaatccttggtaaagaggacctcttttattcgcatccccagcaacaaaggcctgtacaagaaaaccttgttgtttcaaccactgatttttggcctgaaaccattctttgtctaatcccgtctccggacgcggatagtaattgtgccacgcctctagattagaaaaatctgcctgataggtgttcaactcgttaatatctttttcagtcaatgtactcgcatttaaactaatagttattttacgagataattgagcaatggtctgattgtcgatcgcgtaatccattcgcagcccagtgactccccgatccgtcagttcatttaactctttataggaaaatcctgctttagccaatgcctctcctgaaatatctaccattaatgacaaccgattcttttttgctatttcaccaagtgttgtcaatcgttggcgataactggcggcatcatcttctggtatatgcatggatgtaaaaatcccagaaaaaccttgaagcgccatttcttcgatggcatcgatgtctgtggtagtcaaatcggcattcataaatactgaaaacccaaacattgttgattcctccttgctggtaccgttttctacaaaatgattatacaacggcctgtttgtttttgcaactatatttcgtaatatataattataaaaagaaatataatttcataacggtgtattttttaagaaaaagttgtcccttaaactttctaatgcggttcggccattagttgtggtacactttataaggagtcaacgagcgcgtaatttttacatagtaggaggaatcacatcatcaatgattacaatggatgatattattcgcgaaggcaacccaactttgcgggaagtagcaaaagaagtcccctttccattaagtgaagcggacattcaattagggaaagacatgatggagtttctagaaaatagccaagacccagtgaaagccgaagaattgaatttacgaggcggagtcggtttagcagcacctcaactagatatttctaaaagaatcactgctgttttagttcctagtagcgatcctgaaaatccagaacctgaatttaaagatgtgttgtacaatcctaaaatcttaagccactccgtacaagaggcatgtttaggtgaaggcgaaggctgtctgtctgtagatcgggaagtaccaggctatgtcgtacgtcacgcccgaatcacgatcagctattatgacatgcaaggcaagaagcaaaaagttcgtttgaagaactatgcagctatcgtcgtgcaacatgaaatcgaccatttgaatggtgtcatgttctatgatcacatcaatgaaaaaaatcctttctcattaaaagaaggaattttagtgatcgattaacgattagcaaacaagagcgcactcccaagtgggaatgcgctcttgtttactttagtcgtcattcattagaattaatttccctttgccaagctggcttgatggtccgctttgatttgagacaacaattctggcttttgataaagatctaatgcagtcaatgcgagtaattccgctgcgatcgcaatcgagttcagtcctttggtactacgagcagccgctttaaattcctcggagtgaccagcaatgtattcatccgaaattgagacagttggctggatcgtggggatcacttggctgacgtttcctacatctgaagagcctaaacttgcttttgtttccacatcgatctctgcttggggaacgccaacttcctgagtatgggcaaagaatagttcatcaaaacttggtgttacgatcacatcgtcgactgaattctggaagagtccaaattcataagtcgttcctgttgctaaagctgctcctttaacgatattctccactttctcatagacttcatctagtgtcgcccgattggctgctcgtaaataaaaacgtccagctgcatattctggaacaacattcgctgccacaccaccatcagtgatcacgccatgaatgttgacatctttcggcaaatgaagacgcaacccattgatcccattaaaaacttggatcaatgcctctaacgcattaatgcctttctctggtgccgctgccgcatgggatgcccgaccataaaatttgatatcgacaggatcattagccaaagatgcggtggttttgccatagcgataagctggatgcacgcacaatgcagcatcgacatcctcaaaaaatccttcacgcacaaaactgccctttgctgagccattttcgcccccctcttcaccaggagtaccataaacgcggatttctcctcctagttcatctacataaggttgcaacgcactagcagccaatacagaataagttccaaagagattgtgcccacaggcatgaccgatgccgggcagcgcatcatattctgccaaaaaagctaatgttggtccaggtttgccgctttgataacgggcatcgaaccctgtacgatgaccagccacttctttttccacggtgaatccttctttttctaattgggcaatcagcgcatctgcagaataaaattcatagttgctgacttctggatgatcatgaatatccaaagctagttcttggtattccggtaagcgttgtgcgataaattctttaatagaagtttttacagttgttgtcatatgattttctctccctttaatatggataaataagtatgaatagtcagtggtctcacagctcctgcctcagaaaggtaggcattcttgctatactcttctttacttcgcgccaaatgtctcccaggctggaacgctagaacctttcgatgtttcttcgataactttctttgtttcgtccgtttgataagcagcaacaactttttgatacacttcgttgtcttgatcttctttacgcgcagcaatgatgttcacgtatgggcgagccgtttcatctacaggctctaagaagatcgcatcttctgtcggaacaaagccagcatccacagccattccgctattgattactgaaatatcaacatctgataatgcgcgggcagtttgggcagcatctaactcagagattttcaacttttgattgttttcagtgatatccgaaacggtcggcgtctggcctgctgcttcatcaactttgatcaagccagcgctttgtagtaacaacaacgcacggccgccattggtgacgtcatttggaattgctactgtcgcgccttctttcaattccttgatatctttcaccttgtctgaataaatccctagcggcgcattgactgtattgccgatagaaacaagatccgttccaaactctttattgtaattgtctaaaaagaactggtgttgaaaagaatttatatcgatagaaccatctgccaacgccgcattcggttgattataatcagaaaattgaacatattctaagttgataccttcatctttcaaacgatctttgacatcatcccaaacatccgtgtcggcaccgatcactccaagtttgacggttacttctttctcttttgttccagcattgctattgctgcacccagtaataaataataatgccgcacctaccacgattgctttaagtaattttttcattttcttcctccaatagtttctacttaattttatttgttttttttgtcctttttagtggctgacttttttaaccaacagattgctgacaaattgactaaaaaagaccaaaattaaaatgatcagtgtcgccatgatggtgacgtcgttttggaaacgattatagccgcgagtgatcgccaagttccctaaaccgccagcaccaactgcaccagccattgcggtcagtccaatcacattgatgatcgttaaagcagagacgcgaatgatcccagccaacccttcgggtaaatagacccgcacaataattcccaatggactggttcccattgcttctgccgcttcaataaccccaggatcaacttctaatagggcaatttcgatttgacgagcaaagaaaggaatgatccctgcaatcaatggaaccaaagcagctgtttccccaatcgttgttcctacgatcaaacgagtcgtcgttcctaacaaagccaataggataataaaaggaatggaacgtacgatgttgatgattttatccaaaagttcaaataatccgcggctttccaaaatacctcctggtcgggtcacgacaagaacaatgcccaaaatgattcctaaaatccctgcaatcagtgctgtccaaaaggtcatgtataatgtttggatcgttgcttctacaaattcatcagagatagcaacgacattgggaaaataccgttcaaaaaaagtgctcatctaaaatcctccttcaatcacgttattcaatggttccgcgtgattttgcttaatgatattcgtgtaaacaccttgatccgcgagaaaatctaatgctcgtttacgctgcccatattcccctgataaactaacgatcaaactaccgatgggaacatcttgcagaatctctacgtttccgtagaggatattcgtcgtaacttgataacgactaaacaattgtgcgatcaatggttcattggtctgatccccaacataagacagttccaccagccattcgttggcagccaatgaggagaatttcgcactgccgagaatcgtttccagcgcttgatcaatatgagtagcagtccgaataaagtcttttgtcagcggttttgccggctggctaaaaatttgaacactctttccttgttcaatgatctcgccattttccattacagcgactttattacagatttctttcaccacttgcatctcatgagtgataatgacgatcgtcaaccctaatttacgattgagttttttcaataatgcaagtatctgtaatgttgtcttaggatcaagtgcgctagtcgcctcatcgcagagcaagatctctgggtcgttggctaatgctcgtgcgatggcgactcgctgcttttgtccccctgaaagttgactaggaaacgaccttgccttttcttccagtccaaccaaggacagcaattctgtcactttttgacgacgttcctgtttggagattcctgcatatttcaaggaaaaatccacgttgtcaaagacattccggctatccatcaaattgaaatgctgaaagatcattccgatcgttttccttttttctcttaatgctttagccggtaatgcggtcaattcagtctgattgactacgacactccctgacgttggccgctgcaataaattgattacgcgtaccagggtacttttacccgcgccggaatagccgacgatcccataaacatcgcctttatctacttctagtgacacatttttgaccgcttggatcgtctccttgtttggttgtgtaaatgtcaccgatacatcctttaatgaaatcatttttttcctccttattatcgccgattgattaactagttgattttttggggatgatcaactacgcttcctccggtcacctactactgctcatcatctgctcgtctactctatgcttcgcctacagttgcttctaagctgacgctaagaagaacttgcatggtctttgaccaatcgcagtgattcggggtgaggttactacgctccctccggtcgcctagtactgttcatcatctgctcgggtctttgaccaatcgcagtgattcacagcaaaaaggcgtcctcaagcaagccagttatggcttgcttgaggacgcctttttgcgtgttaccacctcagtttaagctatattcacatatagctcctcttcgagtacgatcatactctagcaagataacggatgctgccgtcgccgccttgcatcattgctcgggacgaatcactccttggccattttccaaaattcgtttcctgcttcttttcagctaccgaagctctctgtttaggaacattccttttgtacttaccaattcatcgtgttgactctatttttttatgccgctttttattttcaaagatcgatgaaaacaaaaaaagtccttttaccagcatctgctgataaaaggacgatcactcgtgttaccaccttttgttcagaaggtttcccttccctcaacccaacgtctatcaagaaaattccatcaagagattggtgctccttttaacggtagagcagattccgtgattgcctacttatcgacaatcaatcctccaaggccatttttcaacgtttcagacttaactctttccaccaaccagagtctctctttaaagtatctacgattactttccttatcaacggatagttattcttgttgaaatgtactttaccggaaaaaggataccttgtcaatcagaaaactattttttttcagaattttttggcaatgctagaatctgggcatagcgatcttgccagatccgctcataccaatgaatgatttcagcagctgaccagccttcggatgcataagtagtcgttgcttgctgatacaacacattctgataccctaatccatgggcaaatttgatcgtgccatccatacaaaattcagtttgcgcaccgatccattcgatgctgcgaacatggtgctttgtcaacaaggactgtaaggaggtattgaaaaagctattcgcatgagtcttgcgcaaaaacaagtcggttgcttgcacagccaaatctggatgtaagagccattcatctgtttggtagccgagttcttcttcctcatgctgcacaaataaaacggggcgttgtgcatgacggtaagtttggatccgctggttggcaaacaacagcagcgaatcgagatgatccagtttggtgccattgtttgaacacacgcctttttgtaaatcaacgatgatcagaatatcttgcatccacttctcctttagttttggtataagattcctttatcagccaacaattgctttgcttgctctaactctgctgcttcttggtagcgtaacgtatggagatggatcccattggtcaaatcagaaagcaggcgggcttgtgaatgctggtatttccgcataaagtctgcgacatcttgttccgttttgatccgcagattccctgttaattccccataaatctcatgctcaacgatcacatcaatcacttcgattccgcaagagacaaatgtcaacaattcttcttctgtttgttccggacggtgttgcacagcaagtttgctgacatgacctgtctcacttgcagcttctaagcggtaaccgcgagcggtagccacgatagcctctcctgctgctcgcaacaaggcaatgtcaccaacgatgatttggcggctgacacctaacttacccgctaatttactagcactgatcggtttctcggcggtctgcaactgcttgatgattgcttcccgtcgtgttgctccatccatcattatccctccaattgattcttttgataagtgcgagaatgttccatgatcgactcaaaggttacgacaatcgtttcttcgaaggctttattggaaacggactggcgaacattgttcaaaacagcttcttcccgagattcatccagaactgctgtctgttcctgttttttccattggacgatttcactgactgctgtcatgcgtttttctaataattctgtcagttctcgatcaatcgcatcgatcgtctcccgttgatgatcgatagcagcaacgacttctgtcgtgcttttagttgcgggaacgacatcttttgcgatctcttcgatggtttcaccagattcaatggttttgatgatccgagctggatttccagcgatcaccacgttatcagggaacgatttagtcacgacacttcccgcaccaacgaccacgttatcgcctaagcgaacacctggaaggataactgcaccgccaccgatccaagcattgtcgccaactgtaattggtgcgccatactcaaggccactattacgcttgactggatgcaatggatgagaagctgtaaagagacgaacatttggtgctagcatacagttatcaccaaaggtaatgggacaaacatctaaaaagatacaatcataattggcatagaaattttttccaactgaaatattatagccgtaatcaaagcggacattcggttcgatatagatacggccagccacttgaccaaatgtctcttttagcagttgttctttgatcatcggttcggattcccgattgatcaagtgcatttgttctctggcaaatttgcgatcggcaactaattctggatctggtgaaaaatacaattcaccagcaatcattttttctttttctgtacgttctgtcataatgtgcctccatactccttttcaattttagtgtgagagttttgcaaaaactgtttccccacttgctaaaacttgaggagtcgtattttgttcaagcattgtttggttgatgatcaagcaattctggctattttgatactgcaacaaaccagcaaaaggatagacttgtaatgaggtgcctaccacgaccactagctgtgcattggccacagcgttgatagctgcagtaattgtttcttcgctgaaaccttcttcatacaagacgatcgctggacgaatctgtccaccgcaatcggcatgatgccagtctgtcaaataggtttgccaaggaacttctgcaccgcattgacggcagtaacagcggtaaagggttccgtggaaatcaatacgctgctgactccccgcctgttgatggaggccatcaatgttttgcgagactacccaaacgttccgttcttgagcgaactctgccatcgtctgatggatcacattgggctttgcttcaggatggtagagatgtttgacaaattgataaaatttatccggctctctgaccatacaagtatgactcaacagatattctggcgcttcaatgccatgataaatccctttcaaagagcggtaatccggaataccggaaggggttgaaacgcccgctcctgtcaaaaaagtgatagactcggcagcttgaatcttttcgacagctgtttcaatcgatactaacattttgctgaactccttccgtgattgttctactttttaatagtatacctaatttccccattttttataaccatcatccgcgatttttcacaaaccttcccttgaaaaagcctcaacaggaaggaaatcttcacttggaattttcagctcatttcattgattctttcatgacattctacaaaaaacgtggtaaactattcacgaatcaaagtgaggtgaaatacattggtagcatctattatttattgggcaatgatcatcatcagtttcggctggttggcagttagcttatacttctctattttctatttatctcgtaaagaaaatggaaatctatgggcgtttgctttcttaaatgtcatcacagcaatcattcaagcactcgttctattggtttatcgtacattaggtcaagactggggcgttacacaatactcaagtctcatttatttagctctaggcttattactaggtctgacagttattcaagctgtcttaggccgcgaaccaaaagccaaagttgcttaaagtagccgaaagtaaagaaaagcagttcccttttccaaagaaaagagactgctttttttgttgaaaagaattgacaaatccacctttttcttctacactcgattaagtatcataatcaaatacgagtatcctttaacatttaggtagaggtcgcgaggttcattaatcctgctgagtgaagcaacacgtcaaaagcagagctagggaacatcgccgaaacaaactgattcttgcttgaattattttgttgggacgcaagtgaacaacttgcgtactgtcttagcttggctaagttgcgctatgttttgtgaaaggtttgtcgacgaaattgtcaacagccgttttccaatcatggagtacggctgtttttttgttacctttgcctgtctgtagtgccactcgtgaaaggaaagagaaaatgaagaaaatgaattggttttgggcatttttcgccctctgtttcacacttgtcaatgtatcgatgactgctcatgcagatgatcaaactccagctgatcagtttcgagtggggatggaagcgggttatgcccctttcaactggacccaaaccaccgatgcccatggagcggtacctatttctggcgagaaagggtctgcctatgctggcggttatgacgttcaaatcgcgaagaaaatcgctgatggtcttggcaaagaattagtgatcgtcaaaacacaatgggatggcctggcacctgcattacaatcagggaccattgatgcggtaatcgctgggatgtcccctacagccgaacgacgggaacaaatcgattttaccgatccttactacgaatcgaacttagtcgttgtcgttcaaaaagatggtaaattcgcaaatgcgaaaagtttagctgatttgacaggtgcaaaaatcaccgcccaattaaatacattccattacacagtgatcgatcaaattccagaagtacaaaaagaacaagccatgaaagatttttcttccatgcgcgtcgcgttggcttcaggcatcattgacgggtacgtcagcgaacgtcctgaaggcgtcactgctacaggggcaaatcctgatctgaagatgatcgaatttgccgaaggtcaaggttttgaaaccaacccagaggatgtccaagttgccgttggtatgcgcaaaggtgaccccgatgtccaaaaggtcaacgagattctagcgacgatccctcaaagtgaacgcacgaaactcatggatgcggctatcgaagagcagcctgcggacaccagcggagattcagcgaatcaaggtctgctggccgatttcaaaaaaatcatcgatgactatggttctctatttttacgaggggcaggattgacgcttttcattgcgatcgtttctactgtcgtcggattattgattggtctattagtcggtgtctttcggacgctgccagctgctgaaaatcctgtaagtcgctttttccaaaaattgatcaatgcattattgacgatctatattgaagttttccgtggcacaccaatgatggtacaagctatggtcattttttatgggactgctctagcatttggtgtttccatgaatcgtacgattgcggcattattgatcgtttctatcaatacaggagcctatatgtctgaaatcgtccgtggcgggatctttgcagtggatgatggtcaatttgaagcagcacaagcaattggaatgactcactggcaaacgatgttcaaagttgtcttgccacaagttatgcgaaatatcttaccagcaacaggtaacgaaatcatcatcaatatcaaagatactgccgtgttgagcgtaatcagtgtcgccgatcttttcttccaaggaacatcggctgccggaacaaattatcaatacttccaaacatttgcgatcatcggtgcaatctatctcgttttgacaatctctgcgactcaaattttacgttttgttgaacgcaaaatggatggtcctagttcttatgtcaaactagaagatatcaacccagaataaggaggaagacagatgtcagcaattatcgaaatcgatcatttaaagaaaagttttggcgacaatgtcgttttgaaagacattagtctttcggtcaataaaggtgaagtcgtaacgattatcggctcctccggttcagggaaatccacactgcttcggtgtatcaatcttttagaaaagccaaccagtggaaaaatcatttatatgggcgaaaatgtcctagaaaaaggatacagcttaccaaactatcggactcatttagggatggtgttccagtccttcaacctttttaataacatggatgttctggaaaattgtgtcacgggccaagtcactgttctaaaaagaaatcgcgccgaagcagaaaaaattgctcgggagaatttggaaaaagtcggcatgagccgctacgtcaaagcaaaaccggctcaattatctggtggacaaaagcaacgggtagccattgcccgggcattgtcaatggatcctgatgtgatgttattcgatgaaccaacttcagctcttgatccagagatggtcggagaagttttgaaaacgatgaatgcgttagctcatactgggctgactatggtcatcgtgacccatgagatgggctttgctaaagaagtctctgaccgagtgatcttcatggacaaaggtgtgatcgctgaagaaggcacaccagaagaaatctttatccatccaaaagaacagcggacgaaagaatttctatcgcgggtacttaattgatcctgtgctgaactagggtacaagttgcagacaaaatgatttagacgaacagtcagtgccttcctgtcttacaagagggcattgcttgtccttaccgaatcatcttcttgtcgcttgttccctggtttctttttttggccttggtcaactaagagttgctatttgatcatttttttgttattttttttaaaactagagaactataggagtaagttgatatgaagaaaaagttacgtattcaagactatttgtatgttggttctatgttgtttggtctattttttggtgcgggaaatttgattttcccagtgcatatgggacaagaagctggtagtaatgtagcccttgccaatttaggtttcttagtgaccggaattgggttaccattcttaggcgttatcgcatttggtctttcccaaagtacgggtgtcttcgaattagcttcacggatcaaccgccgttatgccattattttcactgtgttgctttatttagtgattggtcctttttttgcactccctcggttagccacaacttcctttgagatcggacttgtaccctttgtttcccaagatctccaagcacccttgttggccgtattttcactattattctttggggctgcgtggtggttctcacgcaagcctagtaagatattggattacgtaggaaaattcttgaatcccctctttttggtattgcttggcttacttttagtctttgcttttacgcagccaatgggtacaatccaagaggcgcctgtttctccgctttaccaagaacacgccttcttcaccggcttcacaaatgggtacaatacgttggatgcactagcctcattagcctttggcatcattattgtgactgcgatccgtaacatgggtatcacgaaaccttccgaaatcgcgaaagatacgattctttctggctctatcagtatctttctgatggggatcatctacacattgctttcctacatgggaacgatgagcctaggaaaatttgggatcagtgccaatggtgggatcactttagcacaagtagccaaccattacttaggccactctggaagtctgctcttagcattgatcgtcattttagcttgtttgaaaactgcgatcggattgatcaccgcatttgccgaaacctttgcagaattgtttcctgcaagaagctacttgtttttcagtgctgttgccagcattctaccggcgatctttgcaaatatcggtctgacgaaaatcattgagttttcaactcctgttctgatgtttgtctatccgctggccattacattgattttgttggcgatcattagtccattgttccagcatcgtgccagtgtgtaccgtatgaccacttatttcaccctggtggcagccgttattgacggattaaatgcttgcccgacattgattagagacactgctgtcgttcagcagttattgaaatttgcagagcaatacttgccgttcttcaaaatcggcatgggttggctggcacctgcaatcatcggtttcatcataggtctcgtttgggcttggtgcaaaaaagaaccgaaatccgtcaaaaatcattaattcaaaaaaaatgacctaccatttttgaaaggtaggccattttttttgataaaagactgacagttgaaacaaaaacaggtacaatagacccattaaaggaggatatttatgttttacgaagaacttatgatggatccgcaaacgttgatcaaatttaaattattccggcgcatgcttactttacaaaatccaaatcatccaatcgcgcaattagccaaagaaatggacttgagctatcagcaaacattcattgagttgactgagatcgatcaagatttacacgagttgaccccggatcacttgtcaatacttggacgtggtggcaagctgcagccccaaaatattgcggcaacgattgatgagtaccggttttatcttttgaacaagagcgtaccattcttatatgttctttatatgctgaatgaagaaaatcctaccattacggatttttgcaagaaatatgatgtcagccgttcaacagtatcccgaaaattcgaacatctaaaaaaccatttgaagcagtttcaattgcgttttacttatacagaatcgaatctcgttggcgacgagcgcttagtgcgtctttccttattcaatatcatttggttaggcgtccgggggatcaaatggccttttgccgtttctgagtctgatgcagaagctttcgtcgatgagtttgctagctattttcctatctctcgttcttatctagggaagctagagttaaaatattttgctgcgttggtccttttacgcattagaaaagcgaattttgcaaaatacgaccgccgttataattttttgatgaaaaacaatcgctattatgatttcaatcgcttgcgtaccacgttgactgccgatactgaattaacagaaaaacagcttaaaggagaatcaagttttatctatttgctctcccaaatgctacccttctacttgtctgaggaagatccttccttgcaacaaacattgacattctatacgactaaacagaatccgatctatccgttagtttttgatttccttgcccaaatgaaacagacctattttgctggacagcaggaacttttagatgatcctatcttgattggtaatctaatcaatgcgacctttggcaactacgtctttcgacaaccgtttcctaatatttaccggctgctcaccctttccatgggacatggtctgccacaggaacaattgcatcagcatatcgatcaattctttaccgactatcgctcttccaataatgtagactatatcaatgacaccaatcaagaacagttagcagcgatgtttactcacgtcttgttaccattctatgataagatccgctacgccaatcggctgcatgtcggtgtcgttttggaagacaactttttacttgtccaatccttgaatcaatttctgcaagatctgacctttgtgcaagcggatccttatgatccgcaattgaaggaaccctatgatttagtgattagttccaatcaattgatgaaaaaaatgaacccaacgatggcaacttatctatgggattatgcagctgctgatgctcaatacatcgatctttatcgtacgttgaaaaaatacttcaatgaaaaaaatcagcacgtgtaaccgaatcgttatcttttcttaagaacttcggaaaacttttgtcacagaatattcatatttagttagtatagtataagcataccaacaaacaaccctaacactttttcatttttaactccttcccgccggccacccaccggcgggtaattttttgtctctttttctctagaaagcaatctttaaaactttccaagcttttctccacaaaaaattcacatttgccgactatagtataagcataccaacaaacaaccctaactaacacttttcatttttaactcctagcctgtcagccacccactgacaggctcctttttttgtaaaattcctttctgtagtacaatcaatacaaaaaggggagctttatgacaaacaccattgaaacggttgatcagtatattgctggctttccggatcattccactgtattgcaggaggtccgaaatttgatcaaaacagtcctgccggatgccgaagagcggattcgttatcagatgccaacctatttccaaacagagaatatcgtccactttgcctgtgcaaaagagcacataggattttatccaacaccctctgccattcttgcttttgaaaaagaatggcagtcttataagaccagtaaaggaacaatccgtttttcgtttacagaacctattccttatgatttgattgctcgaataaccgcttggcgtttgcaagaagttttagcgaaaacaactaccgattaactaaaaaagtgtaacaaaaaagtctgtgagtgtaataaaacaacgtcctaagatcagcttgattgcttcttccgcctacatggctgctatctgctgttttggtctcttgttttacttacgtcacagactttttttacttttcggaccgcgttgctttgacctttaatgtgctgacctttaaaacgctggctaaagggatcatacgaatttgttgccgatcactttgcagtttcaaaacgacttgttctttcgcaaccgtttttccaacgatccaaccggtaacggtttcaaaactgccaaccttctcggttttcacttgtaagacgaccagatgtttgtcactggccgctttttgcaaaatttgccgaatctcattgatcttttcagtttgattttttttatcggcattgtcactgaagaaagtatccaacaaggttgtcgaagtcatgacaatcaacttgcccagctgtctgatgggagatgatttcttttccattggtctttcctttctgctaacagcagcgggtttctctaaaaccgcacatacgttctcgtttattgcttttattttaacaaattttgaggaaaaaacaagcgaacattccctttattgggcagcattttttattttttctatccaaaggggcagtcctgcttgaatcaagcggtatgtttggttgaaatctcctgtgtaataaggatctggaatatcttctccctctccaggaacgacacttaagtacgtgtaaagcttatgctgcatacctgctggagccattgttgaaaggtcctcataattgttacgatccatgccaatgatccagtcataggtttcaaaatcctcagaagtgatcttgcgggaaaccatgttctgccaagaaatccccgcatctgctaatagttgacgagttccttgatgaggcggattacccgcttcccatgaactagtggctgctgaatcgatctgccaaggcaattgacgttctgctattgcttgcttgaaaagcccttctgccatcggtgaacgacaaatatttcctaaacagacaaataaaactttcgtcatgattattgctcctctttttgataaatttgataagaaaaaaattccacatcttttgccaagcgaaagagttgggtcgcgatttctaatggcatttccggaaaatcatcacgaatccaagtttctaagattccactacagccataagaaaagaaacggctgtaaaaagcaatgtcttgttgcgacaattgttgctcttcatcgacttcatcaaacaagcgctgaaataaaggctccgtaatttgataaaactcactcatcagaatatcccggtcataagtaacagatttccgatagaaggttccgttttgccgcatcgccttcaacattttcaaagctgcttcttcccaattgtctagcgaaatgttttcagatgttagataaatcagcgcatctgttttgtagatccaacgaatcaatgcttttttatccgggaaatgataataaaaggtttgtcgattgatctgcgccttctcagccagctcttgaatgctgattttgtttaattcttttgtctcacaaagttcaacgaatgtttgaccaatgactgctttggtttgattcccttctgccatggtacacctctttttcaaattctctccttatcataccaaatttccaactaaaaaagtattcttgcagaaaaaatcccagctatttcactagctgggatcaaaaaaagagctgaaaacaatttcagctctttttttaataatgcaatccttcacgtcccaatcggttgggtaaacttatttctcaaatttttttttcaaaaattctctgcggatgcccacgactttctcggtaaagttgacccaatccactggacgcggcggcgccagccacaaaatatgattgatccccattgccccataaaaaggcatgtttgaaagagtcagatgagtcttttcatcaggaaaactttgaaactgaatattcaaatcgagaatcttttcaatattgttgcgaatcatttgattatacgaacgaccataagaaaaatcgacacatacatagagaggaacagatatttcttttaatgggatcgttgagatcaataaaatcagatagcgaaagaatagaaattccttgttgttccacaaaatgggtcggttccggttagcttcaaggtaattccgacaaaaagccacatattcagggtatgtttgcaggaaataagtgacgtccaaatgttgatactcgcatcgcgaactgaaagaaaatgaaagcagttggtaatgaatgttcgtcaattcagttgtaagcagtgctagaagctcttggggaagagcaaaacgaccactaagttctgtatagaaatgttcatttaattgggtgatataatgattttgatcaatgtagcggtcattttctactaaccagccttctacgatcagaaaccgcaatatctcctttgcttcccgctctaaggtagtcaggctcaccgtaggcaagatcttcgccagccagtctttcagctcttcaatgattcgtaagtgttcagcattgatcaaaccatcctcaactgtattttgcagaaaatgaccattgcacattcgggtaataatgattcctaagtattgttctttgcggatctgcattcgggcagattgctgagggttcaaccagccttgactattaagcgcatcgaaagtctttctttttgtttcgatttctttcggaaaaaccgactgattcaaatagtattctttcataaaaaacaataatatgaattcccttatttcattttcttcaccgatcaatcgaaattccttcgtcacctcaatgtcataatcattaaggatctgcttgaattgtttaaattctttatacacaggcgtatggcttaaaaaatggttcgtagcgaattcataaagtgaagacagttgttcaaaaaaacattctttcagcatggaaaatttcagtgactggtccaaataataggtcaagacgttatcagaggttgccaaaccagaagcatttaatttgatcacggtcccatcagtcacaataccaaactcttcatccaatccaaattcataaaagtccgtgtttaattcttgaacggtcttgttgatcaaaaattcggacattgtcagattatccatcaatgcctcttttgtctcggataaagaaaccgcattttccaagtattgaagcagcaccaattttcgcttatccgctttattcaaaaatgtcaaaaacatgcgttttcaggcctccatcattcttttgcccataaaggacacttccggtaaataaatagcacaagcttgtaagataagacggctgatcattgccatcaccacctgaatcatcgtctggcattgctaagtcgaccgacagactatttgcaaggaagatatcttccaccgtcacgcgttttgccagctgcttgccatcagccaaaaacggttttgttagattcagtaacggctgttccttttgactgttttcttttgatttgggttcttccttaggcgatgctggttctgctgcttttggtgtcttctcatcaacaggcgcctcgttgatttctggagggtctttcggaacgatttcttctgaaggattcagcggattatagatggtagcgaatacgacctgttcggtaacaaggtcgatcattccgataataatacaggctcctaaaacaaagccaaatttgcgtttcattgattatttcaccgccttaacatagttctatctggcatctcacttgggcctctcctcacgtaccatcaataatcgatgaatctatcaaagacagccccacaccattaggtgtagctgaaaaagccagctgttcttacttgctgctaacttgttgtcctaactggagatctttctccataagacttactttgagaaacaggaaagaaaatgattccgcaatgaatcggctatcgctcatcacttttcaaaaccagttactctccttcattctttttctgacgatgccaaacaatcagaaatgcaatgatcaccaagaggagtccaatcaataaatattgccacgtatgatcttcttcgatagtgacatctttccgattgaggtctcgcgcaacatcgccagccactgtaaactcttttttaaattcccatctgtataaatatctttcttcctcatcaccattcttgactttatactgtccttcatcgctttttccgctgtaggcaacagatttcagcaggtaagtacctgcttcaagcttttgtccttctaatgagatgggataagaaaaatgggaatttggtgccatctgcataccagaagtatcagaagaatagcggctgtcgttttgcccttttttagtgacatcgttgatcaaacaaaatgaattcaaataggtagcggtcggattttgaaaagtcacattgattacattgcgggcattcacttgatcaggttcgacggctaacaacttcaaatctggaacgatttcatccgttgtttgtctcaacaaaattgcgacgacataggcatattcatttttgatcgctaatccttgatcctcggactgatcagaggcttcttcctgcttttcttttaatgtcagtccaccggaaatcacgcctttaaatgattctgaaggcatgcttacttttaaaggcaaagtcacttgagactgtttgggaatcgtgatggtctctgcgatgtctaccaaatccttcaaattgtgcgttaaggtttcatcaggttcgatatcattttgaccatactcaacaacgccgtttagattggtggttgccgaagcgatcttcggctcaatcactacgtccttatccgtatcatttcttaatagaacctccaccgtttgaacagcacctggtgacatcttcaaatcaaaataagtcttagatttgtctatttggttctctggtatgactggatttactgcaaaattgaattcagaggccatgcctcttaccgaaataaaaaagaaaagacttgccaaaaccagtataatgagctgtttactttttttcatgatggattttccctctctatctatgtaccacccttacgtatcaaaaccttacacttaaagggactggttgctatggatttgtcggggtatcagttagcagccaggtaaatgtggtactgtacttcacggcatatttcgttgttgaaccaggcacttctaattcaatactatctactgctgcgaataaactgtcaccccagctcataagataagtaccggctccttcccctttttgggcactcatgactaatgattcagccccattgggatccagggtaatcgtgcttttaaaattagaaggttttggggattcggatggtgtaacgatcgtcccgttagtcaagcgaatttgagctgcttttaattcttggtctttccctgttttaaattggccattttgtttgacatgcaacgtccagccgctttccgttcctcggttatctgtgacttgtacaaaatttggtccttcttgttctgcacctgctgcatcctcatatttttgcaatgaggcatggtagacttccgtttttgaagtgattttttgcatgccaaaatacaaactggaggcaaagtcgatcgataacggtccgttggttcctggttcaggtttgccatctggcgtggtgggatcgactggtttgattggattgtctggatctgggtctattggactgattggatccgttggctccgtgtttggttcaaagacaatttgaccatttgaatgataagctgccacttctgctgcttgagcagtgatcgtgctcgtcattcccaatcctacgaatactgctgcggttactatttttttcacttttctgccccttcttattcagtctctggtacatttttgaggtaccaaatcaaggttgttcgatattctttggctaatttaaccgaacgaccaggaatgtttaattttacagctgccgctccttctgatgcatcagcaccaaagcgatagatccaagtccccatccctttgcctgccgggacattcaccaagttcatttcactattgggaacaaatgtgtgattctctactactgttggtgcatactgcttatctgtcacagaaattgctgttccggaagaaattgataatgaagcccctgctagcacttcactctgtgctgtcttaaattgaccgttctgtatgacgctaagagaccagccttcttgagtcccccgtttatctgtgacttgcacataattcggacctgctaaacttgaagtgaactcttgcagttttgcatagtaatccattgtttctgatgtgatcttttgattgccaaattggaaactggaggcaaaatcaattgacaacggcccagccgttcctggatttggtcccattggatccgtgggatcgaccgggtcgactggtttttccggatcggtagggtcgactggtttagtgagatcattatccgtttcaaaaataattgccccatttgatgtatactctgctgcaactgcggtgatcggcaagattattgaactaaggatgacgatacccatcgttattaaactctttttcatttcatttgctcctttttgataaaatacctagtgctgccaacaagcaacccccatcgcgagttaactggaagagtcagaacccgttgtgggtaagattttaagtccttgttggtcgaatggctgatttctcagtactttcgcctatggtcttggattttttgctggatattcctaaacgccataaaatgacgttccgccattgctgtcatccgcgcctatttcagcagctaaggtagttgccaaaaacaagaataatcagccgagcaaacttgcattaatgactatttttatctttactcttctgccttttatggattgcctggagcagatactagttgccaggataacgttccgctatattcgcctattttttgcttttctaccggaacaactaatttaagacctttattcgctgtttctccccattcttgattcacatgatagtcgccgttttcggtcaattccgtctcttcaacgataatttccccatttgttagtaattgctcttccccattttttacaaagaacaacgtattttctaaatgatctgtcccattactcaagctctgctgttctttcacagtgagccgccaaggacttcgttcagatcctcgtgtatctttgacaatcaaatctccttgaatgtcaggccaatacgtttgagtggtggtagtgattttttgtgccccaaaatcgatagttgtcggtacactgctcaaggtcaactcaccagcgatcgccacattcactgttttttcagcagtttgcccattttcggtgaaatgatacgtagttgtgacattttttagcagctcttcttcgcttgtttgctggatcgattcgagtgcttctggtgcaacttgcggcaactgctcgtctcgaccatcagcaaaaatcgttgcggcttccgtatatgctgctaaatcagcttgattcgtgatagccgttgcttcccctaaagtcaagcggctatctttggcaaagacagcgaattgccgattgcttgccaaggcactctcatttttcacgactaccagattgactgcttgttctacagatgattgatttgctgctcctgctttgaatgaaacaagatgcttgcgagaagttgctgaccccaatggtttttgaatctctgctattgcttcttccgtcagactatctgtaaagaatgggcgtccttgtgcctgcaaatagtccagtgcatcttctttagtgaggttctcagcttcttgttctgtaatgattgcgttctgagcacgaagttcagcttgattcgagtaagaaaccttcacttgatagctgtattcaccatcgggaatctgccaatcgactggatctgaagacgattgttctgggattgtttctgtcgcactagcaactttgcttgactggatctgtccagcataaaaccaagaacctttattctgggtttctggtgtaaaggtcagtatcggtaaatttgacccagtatacggaataagcagccgccctttttgaacctggatgccagcaatatctgttccccatgcttgaatcacaagtggcgcattattttctttaacgcctgtcacgtcatgagtgattgaaccttgcccatcagcgataccgggcatttcgacttcatagtcgatcactgaaccaggaatcgcaattccgtagccattgactcccgtcacatcattgtccccaatgaatgttttaccagtcgctttttcgatgccgctaaaagtgatcggcgtgatcggcgtcgcattgtttgcaactggattgatagtcaatacttggtagcttgtgacttctccaaaccaagtgccctgactttttgctcgtgctgcagcatcattctccgtatttttgatccaagtcaaatgatctttttttgaatctggcacttcaaaatcggaaaggttgatccgaccagtacccggaggagattcaatggttgcctcatcttcgatggttaacttactgcctgaaatcatgttgtttgctgaagaaattccaataccggcatttttcgacagctggatcgtcccaaactggtgataagtcgtactatggttggccgctgtagctgagcgcccattttttatatccccaccggtagccatcaatgtcaatccgttagtcacagttaattcggtaaaattcacgagacctaatcctgtcatagatatgggctcatcttggtaagcattggttccatctacattctcgccaaaattcattttgacttgattggtgctgttagcaacgattgcattggtgaaattgtccgttgcatttccgccagagatcccattgatacttttcgccccttgaatacgcatctctacatcgcgcaaaatctgattagaggaaatattcgagtaataggtggtatataaattaccaatactggaatcttccgcttgaatgttcatcatgatcttgccgcttctcgtattgctagcagttcggccgccatccccataaatcgtggcaccgttcaagacatccgatcctggttttgtatagatgttcagcgtaatcgtattggatgtatctgttccgacaatatttgtactgttgaatggatttccgccagaaatattggtcccgctaggcagcttaaactcaccgtcataatttcttaaatccaatgttaaacttgcatttcccaatagtctgccattattagtcacaccgccagaaaaaccattagagccagttcgtggggtaccggaaaagttcccgccgaaaatccgattattcgaatttccgttgatcgtatgagaactggaatctccgtatgaagcccctagagaggcattgatcaccccatcataaaccgttactgccacgttcccaccaatcaagagatcgttccagccgccgccagacaagaaccaatccacttgtccgttattgactgtcgtttcaccattaccatagactcttctaccggtatagccagtaccttcaagggtgtctacgatccctgagttcaatgtattcgatgcatttccttcaataactccagagaaagagccgccataggtccagcgagcaaccgtattatttagaattgttttagtattccctttgatgtagatattccaggtagttcccggatctcccccaccgccgacaatatcccagccagatagttcccctcgatttttggttgttgtggaataagcaaggttggtcggttttgatcctttataagcaataccgtctccacctggactgccatctgctgtaatcgaccccacttcaatcgtggtattcccatcaatataaccgccgcgacctgcagctgtagtatatgttgcaccatttgaaaaagaaccgctgaccagatgggaggtaatattgccgtatactttgaaacttgctcccgcttctgctaattgagcccgttgtgcgggagtataattgtcgtaagtcgttgtattcgaagctcccatcgaactttgtgagagcgtgctgacattgttcccgccgccgccattgaaatcaccgatcccaccgacactagcgctaggacccgctttgaccgtatttacgatgtttccattgattgtgccagagtatcgattaccaccttcaaaagttgcccggcctgtagaatagagactcgaatcaagattcgttacgatggcatctttagcaggttccgagccaatatttccataataggaaccgccgataaaacgattggctgtcccagtccagcctccactaccggaaacagtgctgttgattctaccgtcgatcgttccatactgaacccctccgacaaacgttcccaaccgaaaattggcatttttcgtagcaatcgtcgtttcaacattcccagtcacattggctgcatttgtagcacttgatccaacaccaccgccataatagtttgtcaatgtgccattcaattgcttgatcgctacttttgtattgccatcgatcgttccaacattggctccccctgcaatggtacttatcccagagacggtattgtttacgttgatcgttacattccccttcaacgttccgccgctttggttgcccccataaatattccaagtacctgaacccgtgttattcacatggatcgtcggattgccttccagatccccactgtttgtgccaccatatatcgtaaagccatttccaacggcacccccattgaggaaaagactgtgcccgttcatgtaaatcgtcgatcccctatagtcgatattgcgaaacacgatatccgagccaaaataattattcgttgagaaatcaacccgtcgactgtctgaagccaatgttgtcgcatctgtgatgggatcgttagcatgaccagttaatatcaagcgactaactttcccttgtaatgcataaaacgtgatattgctactgtctactgtgcttggtattgttttggctgtcagatcagccggtaaagtcaaggtaccccctgatccgacatacaaagcaaactcaccgccattgccattttgatacatatcaaacaaggcttgccgaaagccatcgacactatttgcatactcagcgtaagtttccccatcgcctgcaggacttggaacggcaacaagtcgtgaaggatctgcacttgcaataatatctttgatggacaggtctactaaggaaccgctagaccggacactcacgccctgtttaaaaactgctagcaggatctgatcatgatctaggtccacgttttgcaatgcttcattactataaatttttccttctagctgccagccttcaaaggatgccggatttttaaaggaaggaatgtccgttgctgtaagacgttccccttttttcttgctgatttgaaggcttgtttctcctgtttccaacaaacgcccttcagcacttttgaaggttatcgtcagttcttctgactcttgtgaagaactagtaacagattcttgggaatgagattcagatgctgaatgtgctggcgattcatccgattctgctgtttcagtcgcttcagatgtttcgtttgtttcgttatcctgacttgcggtaccttcactgctttcactgctactttctctgttactcgtgatactttccttattatctatatcgctaagcttttctaactcgtttaaagtatccgttgtttcacttttttgcgcgatactttctgcatgtgcaactacctctgtatatgaaaaacaaggagaagatactaatagaaaaacaagaaaattggttaaaaaacgattcactttatccctcctgactgagtgaaaatgagtaaaatattgcgcaatacacgcattatgctatccatagtctatatccaaataaaaaaaggattataattttttttcatccattccaaaattatgattataaattgacatcctaaccgcttgtttcttctcatttttggcattgtcaggcagtttgtttgacatttacttgaaatgcttggaaaggataaatttagagttaatttcacctagcatactaaaaaaacgtaagagttcaagagatataattagaataagattataaaaatcacataataaagcaatctttaccactgaaaaattaatctattatccgaattatttgtacttgatgcccctatatagaaatcgctaacatcatttatatttcatagaattaataatgttataacgaataataattcactgtattttctaaaataaaataactcaaagtataataaccgaaaaaaattttataattttttctaaacaacattagaaaaataatacaatcataaaaaataaaataactattaatctaatttaacagcatgtatttttatttccgtgcgcaaaaaaagcaccaaacagtcctctgtttggtgcttcattttcaattatttggaaaagaacgtccatcaataaatgttgtatagatatgctcgtcctctacttgctctccttgaatcgatttgacgattttctctgaagcaatcattccccaacgatgcttcgagtaagaaattgtcgacaaccgcggctgtataaacgcccctaattctgtattgtcaaaaccaatgatgcggatatcttctccgatttttaagtctgttttacgtacatacttataaaccccgatggccatttcatcgtttaaggcaaagatatcgattggtcttagcggattttttgctaaaatttcttctgctccccgataccctgagggttcagtaaaatcaccagctattacatcataggaaatgccaaatcgggtaagctctttgatactggcttctaaccgttcttgactatcataacttttttcaggaccagcaagtaaaaagacatgttggctgccacctgaaatcaatttatcaatagccagtgccgcaccacctttattatccaaaaggacttgatggatattttcatgatcgaggatccgatctagtacaacgatttgatgtccccgctgagcataccgctcaatttcctctgaaggaaaagtccaatctaaaatgatggctccatcgatcatacgctctggtataaacaaatgggattttttgccgctgcaaacaatcatttcgtaaccaaaagtctcgagactttttttaatcccgtctagcaactctccatagaaactccccgcgtagtctgcgaggtacacgccaatgatgttcgtttgtctgcgcttcagtgtacgagcagccatgttcggaacataattcaagtcacgagcaatcgcttggatacgggcgcgcgtctcctccgtcactttagggctgccgttcaaagcataggatacagtggaaatagacacaccggcttttttagcaatatctttgatccctaccatggctcctcctttctatcgataaatatcgatatgatttatttccttattgaacaacggcagcactgctgatttgtctaaacaaaaggccccttttcgatagctgttttctgctagtgtatagtctaccggttggccattgatcaatacctgttcttttgacgcttcgtgaaaatggatcttaaccggttgatcaaagacccggtaggtcatcgttaagtcagataactcagttggcaagacaggatcaaggaacaaatcatctgccatttcgcgaatgcccaagacattgctgatcaattgattcaaatagatacctggtccgctggagtacacgcgccaaccgccttttacaccgacgcttccatctctaagtttaccaaaattctcttgggcttcaagccttgttttgaaatcgccgtcagagctgctgaaatagacattggcttgtcgcagttctgcatttggcacgcgttcttgcaactgaataggattgatgacccctaaagcatgccaagtttcttctttttgtcccaatttggccattgcttcagtaaaacggatgtgggcatgaacatattgcaacccgatttcccgaccaaagttcgctgcttgctctgcacgtttgaaattcgtactgaccccaccatgataagccgctggacgattcatcaagcgaacgccatctggatgttgcaagtgttctttgatgatgcctaaatggtgctcggcttcgtccggagaaagtaattcaccgatcatgctttgctgcatcggcaacaatcggtactgaatccctgtctttttgtcttctggatggatcatcaattccacatgttcagggtcttccatataaacaaatcctgggatggttcctgaggacaaaatgtatttatcaaaatctgtacgaatgccgctgacgatggtttgtaaatgatcagcataatttggatcatagtctttcagctgtgccgctagtttcttcatcacttcataagttaatgcaactgtccaactgctggccatctgctttttcaatttgctattgtttggctgcagggtatcatcccagtccccatccccataacatgaaagatacgtaccttccaagaaattcgcttcgatatatgcaatctctttctgtaaatgatcataaagagaagcagtttgacttgtctttaagaacgtttcgcgatctgtataaggtatttgcgtttctaaaatcgcgaagtccttcgttttttccaagtaatcgctgacgactttcattggccacacaatcacatctccatgactttcgtcggctttttgtttttcgtagcggtcaaacataaaccattgcggccaattgccatcgtcggcaaattgattggcaaagaggtgtttgatgatcgacgcaacgatctctggacgattgactgctaagaaaaattctgttggtccttgtgagacatctctggtcccccaagcagcaccgccatactgttccaaaccatgaggagacaaataatggaccagcatgttgtgcgtgtaccaccgagagagcaaattaagagtttggacttctgcttggtcatgggtcaattcaaattgattcagcagtgaatcaatgaacgtcacatattttgcttcttcttgctgcttagaagacgcttgttctcggtaaggatctccggtcaacgttccctgaatcttaagggtaacttctgactgatccgcaaatgtcagaacagttagtgcgccatcactgttttcttgtaagaacaaggaatcatctgtcacatcaaaaggctgatccgcctgcagataataagttaattctggatacgcttcttttactggtgacgtagtcccgcttgtgatcactacttgctgctcttttttcacaaccgctgtcggtgcttcttcatctggtcccatcaaaaactggttgctgatggcccatgaataagcctttttgctatggatcatcgttcggatctcacggctgtcaagcagtgtatacgtcgtgaccgtgatcaaatcatctgctgttttgtaataccacgttgcagagttcagccccatctcgaacgcagatggcatcgtcaataagcgccacgtatcctgttctttcaagtagatccgctgtcctgatcgtttcatgacattcaacgcattacggctgttactcaataatttattcattgacgtattccctagaacgatctgcgaattgaaaataccatacatataaaccgtcgtactaagcaacggctgatctaccactagatcactgccactcagcaatatatgcccatgagcccgttccatggcactttctttttccttcaacacaacgtgacggtagttttcggtaaaaaatgaatacatttggccatcgattcgttccattgcttcctgttttggaaatagcgcggaaatatctgcttctgacaaggtatctccagtcaatgctgctccgagttgttttgccggaagtagctgtgtcgtcaatgactcaaaagtcaatttttgaaactgttccttcagagaagggcggtcgaattgcggaccggatactgcttgtggctgatctgccttgacagcactataaaaaatgacttctgttgtttcgtcagatagctgataagactcggactgcaaagcaatgtaggcaaattcatattgatacacttcattcgctaatgtttcgtgcgctaaggcttgcggcaaattagtcaccttgtatgttctgccaaaaaattgatacccatctgttgaataactccgcaagggttggaaacttccttgttcgactaatggaaatttgccggattgcggttgattttgacgagaagagacgacgatcgttccgttatcctgagtcacgtggtgatccagatattgagaaacatacgcttcattggactgaactgctccttttagtgcattgcctatatcttgaccataaatgatatctgcttttccagaacccgttaactggattcgccaaaaccagcaatcttctgccagttgcaagtccacttgataatgaacgtccaaaaactctcctgaccaagacaactgctgttgggaatacccaaacttactggctgaattagaaccgaccatcggtgtccaacgaatcccttctgatgtatagactcgcagatacaattgattcaaactgccgtctaacggattgccatttagttgattgatcatcatgccattgctatctatttcatacagatccccggttttcaaaaacctcaggcgtgtctgattcttttcaagagtaatatattgtgtcatataaaccttcctatccttatcttacgaatttgaatgtagccatctgcagatcgcgactgttgctgccgaccatggcttggaatgtgccagcatcactggatgtttcctgattgctgtggacgtaacgcaacatatcttccgtaattgaaaaagttacttctttggtttcccctggttctaaccatactttttggaatccttttaattctttgattggtcggacaacttcaccaacgaggtctcgcagatataactggacggtttcttcaccagcaaagtcgctattattcttgatctgaagggatactgtcagtgtctcttcagcagacagttgtgatttatctaaacttaactcactatactgagcctcgtgatagctcaaaccgaaaccaaaaggatattttgcatagttggagacatccaaatatttcgagacatatttttcatcaggtgcactttcataaggacgaccggtagtttcagtattgtaataaacaggtacttgaccgactgtttctgggaaagacatactcaaacggccgcttggattgtattgtccccataaaagatttgctaatgcgtgaccaccttctgttccagggaaccatgcttcaacgatggcttttgcttcatcaatgccttgaagatctaatggacgaccattatacaaggtcacaacgagttgctcattgactgcctgcaattgtttgaataatgctaactgcgcttcaggcaagcgaatatcgctgcggctcgctgcttctccgctcatccagtcttgttcacctagtgcgagaaccactttatctgcttgtttagctaatgtaacagcttcattgatcgctgcttctgttggcgcaaaataatcgaatggttcttttccataaagaatgttctctgaaactgctttgctcccttcgatcaatgaaacggcttcttcttgtttcccttgccatgaccatgcacctaaaatatctttagagtgagccgctggtccaatgatcgcgaccgtctccgttgatttaaatggtaagatgttctcattcttcaataaaaccattgatttttgagcgatttctctcgcggctgttcgatgttcttgcgaaagtacgaccctagcttcagcagcttcatctgccccacgatgaggattttcaaaaagaccaagatcatttttaagggtcaagatccgcaatactgcttcatccaataactcttccgcaacagcgccttcttcgatcaattctttcaaataatcgttgtagcaagtcgtcatcatttcaatatcgacgcctgctttgatcgctaattctgccgcctgtttctcatcctctgctgcgccatgggcaatgatttctttgaccgcaccccagtcagagatcactacgccatcaaaaccaaattcttttcgcaacacatcacggaacaaccagcgattcgctgcagccggaatcccatctaccgtattaaaggaagtcatcaccaattttgccccagctgctagtgcggcttggtagcctggtaagtaactttcccgcaattgacgctcagacatattgactgtgttgtaatcacgaccgccaattgctgcgccatacgccgcaaaatgcttcacacaagcggcgacccgttcaaaatcattggtcaagtcttctccttggtagcctttcacgaaagcttccgcaaggcgactgttcaagtagtgatcttctccggtagattccatcactcgtccccaacgagggtctcggactaagtccaccattggcgagaacgtcacatggagcccagacacagcggcttctctagctgaaatttcggccatttgttccgcagcattcagatcccacgaactacctagagccaatggaatcgggaagattgttcgaaacccatggataatatctgccattagaatcgtcgggatctgcaggcgattgtttttgatgtattcttgttgtactcggatcgcttctttggcaccggaaacgcctagcgttgttccagcgttgttgatggtttcttgggtcagtcccagatcactcatcggtccggttttttcttccgctttgtctgaataaaacgcagcagccagttgcaataattgatcgattttttcatcgatagtcatttgttcaagtaagtgcgtcaattttgtcttttccatttttgttccacctttatcgttcatcgaatcggagatctgcttccaacgggaaatgatcggaaggaaaccgtccgtcacaagaatccgtcaaacacccggttttaatgattcgaaatcctttagtataaatataatcaatttcttctaactggttccatgggagttgatagtcaaaattttgataggaacctctgggaccgtaatgtcctttttcattttgttcttttgcgttaacaaaaatcgtttgcagggattcatggacgcgttcaactgcttctgcattgagatcccccattagtaaaacgggtaaagcggcgattttatccgctaaccgttccaagatgactttcatcccttcaaaacgggcgatttctgaaatattgtccagatgcgtgtcgatgactaaaaagtcatgtccttttctatctcttagtaccgtccacaaacacagacgcaagtattccgcttctggatgaatacttggcacatcaggtgtcagagataaccaaaatgagcctgaatctactttagaaaacatcgtcttcttgtaatagatcccgataccttctcctgttccatcgccgtctcgttcagcagttaccgactcgtaatcagtcaatcttgctaaatcagcgacttgcgtcggccggacttcttgtacgcacaaaatatcccaatcatgataatcgatcaatgccaatactttgtccgcacgataagaccattgccactctttatcgtaatccgtatccacacgtaaattgtaagttgccactttcatttcttcatatcctttttaacaatttttggatctgttgcatttcttttcgaatctgtttggcttcaccgccgccatgccctttgtttaaatacacagttaattgttttggggttgagattcgatggtaactgacaaaaaaatcggtcattgggcagataggatcctggctccctactgaagcaaagacagggccagtgatttttgctgccagatttttcaaatcatagtaggccatttggtaatagatggtctccttgctatctggaaaggtatcaatatattcttgcatcacatgatagctcccagttctgctttcgatgcggtgagaaatattcgagtgactaggaacatctgcaaaagtcgcaaagattggcgtttcagccagcgcattgacaattaatgcaatcccgccgccttgtgacccgcctcttaaaatcactcgttcagaatcaatctccggcagctctgctgcgacctctagcaggcgaagactatctgcaatcatgcgtttcatataaaaatcttctttttttaaaattcctcgaccaaacggtgcctcatgttgcgtcgtttcataaggatgtgtatctttcgtacggccgccttgcccgcgattatcgatcaccaagcaggcacaatcaatcaatgcccagtgggcaaactgaaagggttcctgtaggtgattcatataacctaaataatcgatgacgattggaagttggctcttatttttcggaactaaaagatagccgtaaatcgtttcattgtataaactttggaaattgacctgatagacatcgattcctgtcagcaatgctggttgttgctttcgttcaaacgctaatggaatctgtttgatttcttgtttgacttgtcgccaaaaacggtcgatttcctcctgagatggttcatttctaattgatttcattgacgtcaccctcttttgcccacaccttatgaaagaacagtacttgcagataagcgaatcctgaaatacctaaacatacgaataagaaagaattgatcttattcagcaatagaaatacgaatactggaatcactagcaagatgatcgcatttgcggtactgctcaacaccgcataggcagtttcgtgtgcggtttgtttgactgtggaagaaaacaaacaaaacagtaggacaaacaccgtcaagaataaaccagctaaactgctgagtatcactgccaacaccccaagataagtggtgattcccatcaatccataaatgatcgccgcggtgacagcaacataccccacgatgatcccttcaagtacgattccacgtttgatatttgctagaaaagctcgactataccgttgccaaactggaacatctttttcttggtaaagctgatcgatggtttgatacaaggcgatcaaggctggtcctgtcagtacaatcgtgaccgcaggaacaaggaacaaaaaacttaataggatcatatccgcggcaaaggaaaagacacgatagtaccatccttcataagagaaaatttgtttcatctccactcacctgctccctttctagtttcaatcctactgatttcttgttgttttcttactcatctcttgtttattatccttttgctaaagtagtaaaaagatccttttacatatacttttgttggtacttttctacatctgctcgtctacactgcgcttcgcctacagttgcttctaggctggcgccaagaagaacttgcatgtcttgctttgcaagccaatcgcagtgtttcaaagcaaaaagaggaaaggtcgttgggtctcgctttcctcttttcatcctttctataactgattatttaagtttttcgcggttttctgccattttttcagatttgacttctttgattgcatcccaattgttggaatctaaaaaactttcaaaatcagacagtgttgaatcaaacgttttttcatcttttgaacgaatcaaggagatgactgtgctatttagttttgttttgatcgaattattggaacgagcttctgcagtcccagcatctggatctgtgttctcaataacaaagtgcggataaagttttccttcgccccattcttgcatttgggttaatgcgctctctgtttctactttcaatgcattgacacggtcattgttgaagtagttgaagcgactgataccatatttcttgttgtacccttcgttatctgttttctccatttcttttacttcaggtaagtaatcgattttgccttcgtcattgtattcataagtgacgccttcaacaccgaatttcgtcaagatttgtcctggttcatcgatcaagtaagtgaatagttgagtgacttttgctggatcgactgcatcttttgtgatgtagttgatcaaccagcctgagataccggtttgattcaatgttggtttccggcctgatgtgctggctggtccatcaatagcaatatagcgagtatcagaattcttcataaattcagtaaagttgccgccttgaccactagttcctgcaacaagcatcgttgcatatttcccttgtttcactttttcatcataggtcggaccgtcatctgtaaagctgtcatcactgatgttgccttcacggtatactttgttgaatgttttcaaccaattgatatattcttcatctaagttgcggtcatagtaattaccagattcatcttctaatggaacacctaagaagtcttgtaatttatctaagaaaggacctgctgtgtcaccgacagtcgtgaagcccattggggttagatcaggatatttctctttgatttgatccattactttgacaaaattttctggtttagaaatgtctggtttgccaagtgcttcatagacatcttcacgaatgacgaagttatcatttaccggaatattgccgctttcataatcggctgctgtattcgaatagtttggatagccatatgttttgccatcgtctaatgcaaaccaattgaaggtatcttctgttacgacattcaataggtaaggatcatattttttcgctagatcattcaatgagtaagcccagctatctgctttagtggctgcttgactggttttgtccatcaatgtcacgatgtctggcatatcgccacttgaaataagtgcattcaacttcgagtcgtctccggaaataaattcgatatcgatatttaaatctttcttgatctgtgcggtggtaacatcttccccaaaaggtaatgccgtccagtctgagttgatgtaccaagtgattttagttggttcttttttggtatcaagtttccatgctggtgttttctcatcaagctcataacgatctttgatcgaaaaatctgagctgctagcgtcatccgagctgccgccacatgctgctaagctaagtaatgctgttgctgccaataaactgcctaatacttttttcatactgatccctctttctattcttttaccgcaccggccatcataccgccgatgaagtgtttttgaagtaatggatagataatcaaaattggtacagtcgtgataacgatagtagccaattgcaccccgcgggtcgttgcctgcacgacaaagtcggtactaccgctttcggtcatcgtgcttaagttggactgcacaatgatttcatagatcttcatttgcagcggatagagatattctttggtgatgtacaattttgtggtcataaagtcgttccattgtccgacaccattgaacaatatgatggtagctaatgctggtttcgttaatggtaggaaaatcttgtaaaaaatttgaaattcgctggccccatcgattttcgccgattcttccaaagaaggaggaatctcacggaaaaagttcatcaagataacgacgtcataatagctgaataacgctggaatgatatagacccaaaatgaatctagtaaccctaacgatttgatcagcaaataggttgggatcatccccccgccgaagtacatcgtaatgactcctagcgtggtgtagatattccggccgatcagccgtgatttactgagtccgtatgccacaacggcacaaaacagtgtatgtgtcactgccccgatcaatgttttcagtacagagatcaaaaatgcccgtgggatactgtcatcggaaaatactttccggtaattctcccaagtaaatccccgcggccataaaacgagaccgttttcagccaaccctgaactagaagataccgatgagactaagatattccagattggaataatgatcagcagcgaaaacagaacgaggatcactgtgttaaagaaataaaaccatttgttctcttgtgttcttctttttatcacttggtcacccctcctataagataactgaattgccattgttcaatttgcgtgtcacacgatcggtgatgactagaagaatgacagaaatgattgctattcccaagccaaccgctgttgcatatgagaaatcgccttgtgtcagacccattttataaacgaatgagttgatgacttccgatttgttttggttttgtgaattcatcaaaaccaatgtctggtctaaattagatcctaagatgccgctcacatttaggatcagattcaatgaaatgatcggcgtcaaaagtggtaatgtgattgtccgaatctgcgtcaacttggtggcgccatcgattctggccgcttcataaaaagttggatcgatacgagacattcctgcaagatataaaatcgttccccatcctacttctttccaaaggtcagataaaacagcgatccaccaatatttattaggatccaacaaatgattgacacctttatccatcattcctaaagacatcaggacttggttgataaacccattggtcgacaaccatgaaatcatcataccgcctaggacaatccaagaaaaaaagtgagggatatacgaaacggtttgaataaatttcttcaattttccgtcccgcatctcaaaaatcataatggcgagaataattggaatcgcaaagcctaagcctaacttcatcatactgattgctaacgtattcccaactgcttcccagaaaaaactgtcgtgtaaaataattcggaaattctctaaccctacccatggtgcggaggaaatcgtatcaatgaccgtataattcttaaaagcaataatgattccataaattggaatataattaaatacgatcatgaatgccacgcctggtagtaccatccaatgcagttgccgctgccggtatatctctttcagcttactcatacgcaaaaaccctttctgttatcgtctcaacgctcatcctatctttttctttttagtgaaacgtttctacgagttgattataaatcgcgctagaaagaaatgcaagcctttacatcattaaagttttatcatttttcattatctcatttttaatgacttacatatactttaaagatatttttcacaaacaaaaccctttaataacaaggttctccactacaccagatcacttatttttgtttttctacagctcttgcaactgtttattgcgttgtttcttttctcgaagcaactaattttagaacatgaacgatagaaaaacgtttcactaaaccataaaaaaagagctttacagctcttcaaaatgattttcatagccaaaatgggtataagcaagtgtggtagcgatccgtccacgtggtgttcgtttcaaaaaccctctctgaatcaagtaaggctcatacatatcttccacggtctctgtttcttcaccgatgtttacagataatgtgctgaggcccacaggccctccaccatacaactcgatcatcgttcgaatcagcttctgatccacataatctaaaccagcatgatcgacttgcaaaagcagcaaagctttatctgcgatttggcggtcaatgattccattcgcttgcacttgcgcgaagtctcgaacacgtttcagcaagcggttagcgatccttggcgttcctcgagatcgtcgagcaatctcaaatgccccttcttccacgatctccgtctgaaaaatatccgctgaacgtaagacgatttcttttaagtcttggtcttcataatattccatatgagaaatgatcccaaatcgatcccgtaatggtgcagaaagcatccctgccctagtcgtagctcctactagggtgaatggcggcaacgggaaatggaccggatgcgcagttgttccttggccaaccatgatgtccacgaagaaatcttccattgcagaatagagcatttcttcggcaactcgcggcaaacgatggatctcatcaataaacaagacatcccccggctgcaattcattcaaaatcgcaatcaagtctcccggcttttcgatagcaggtccactagtcgtcttgatgttgaccgccatttcattggcgatgaccatcgccattgtcgtctttcctaatccaggtggtccgtaaagcagcacatgatccaatgcttcttcccgatttttggctgcttgaatgtagatcgacaactcttcttttactttattttgaccgatatattgcgcgagaaactgcggacgcaatgatttttcgatcaattcttctgtttcattcgtttccggtgaaacaatccgttcatccgtcacctaactcgctccttattttttcatcatcaattttaatgcttctcgtaagtattcatctgttgatttagtcgtattaggcgctaaatatttctcagctttcttgatttctttttcactatagcctaatgctttcaaagctgccatcgcttcgtccaacgcggtattcgccacagtgactggtgccgttggctcttcaccgactaattctgcgacttttccttttaagtccaatatcatttgctgtgctgtttttttgccaacacctgggaatttggttaaataagtgacatctccgttttcgacagccgtaatcaatcccgcatggtcttcattcgccataattgccaatgcacttttaggaccgatcccagagacgctgatcagttttaaaaataattgctttccttctaatgtagaaaacccgtataaactatgggcatcttctctaattacttgatgcagataaatcttcacttcttgattcagcttgccgctgaacgcatacggattgccgaatgccacttgataaccgataccgtgcgtttcaacaacgatatacgccggaaagatatccgtgacttttccaataatatattcgtacataaccgttcctttctatacatctagctgtacatacgttccctttattgtagcatagactgaaagacaaaaaaagaagcaagcgaagcttgctcctttactcaacaagagaagtatattctccatatccttgctcagccatttcttccaatgggacgaatcgcaaggctgcggaattgatgcagtagcgcaacccgcctttgtcttgcgggccgtctgaaaaaacatgtcctaaatgggaatctgcttctttactgcggacttcgacacggtgcatgccatgagagaaatctgctttctctttgatttctttgcggtcgatgggcttcgaaaaagaaggccatccacaaccagcatcatacttatctgtcgaagcgaatagcggttcgccgctgacgatatccacatagatccctttttcataaaaatcatcataagtccctgtaaaaggacgttcggtcgcattttcttgtgtgaccgcatattcgatcggtgacaatttcgctatcaaatcttcttttgattctgacatttttctcacctactttcttctcttatcttgccttttttccaatcgtttgtaaacgaacttgcttctttacttaagaagaggggagttctggccaccttctggttctttcagcaaaatgataaaacggcggctggtctttcgtatagatttcttctgtgaaaactgcttctgtcaattcttgaaacaaaccagtggcaaagaagaattctgccgtctcctgtgcataataaaataagctagagccacactggcggcaaaatcatctttgcgcccaattagaagagttataccgttgaatcaaggattcgccagtaaatgtgatttgatcacgggaacaagcggccagcgctaaaaaaggaccaccatgaaatttctgacacattgagcaatgacaagcagtcacttggggatgaacctccgttagctcaatcgtaacttgaccacaaagacacctgccgtatagattcatttttccagctcctccggaaattcttttaataacttggcaaccgtattaacagggaagccaacgatcgtataaaaatccccttggatcgcttcaacaaacacttttgctgctccttggatcccatagcccccggctttgtcttgatattccccagttttcagatactcggtaatcatttgctccgtcaacagactaaaggatacttgtgcagaaaccaatttttctcgtcgtttttcttgtttttgtaaaacgaccgcagtatggacccaatgagtctttccactcatcttctgcaacatccgtctggcatctgcttcatcagcaggtttgccgaaaatctcctggcccaccactacggtagtgtcactggcgatcacaagatctgtgggaaagcaggctgtgacagttgctgccttttcccgcgccattcgctgcacatactcctctggtgcctctccaaataccacagactcatcgatatctgccggctgtatctgaaaagatgggaccaattccgctaataattcttttcgccgtggcgattgagaagctaagacaatcattccattccactccttgcacgatgcggatcttggatccgtttaaacattcgctccatatcactattggtaaaatgaatcaataccggacgtccatgaggacaattgaagggattctcacactttgcaagatccgccaataggattcgtgcttgcgcctcatttagataatgattggctttgatcgaacgtttgcagctcatcatgatcgctgttgcttccctgaatttcttgacgctgactgaacctgtctctaaaagcatgtcgatcatttctcgaatgatgctttcttcttctcctgctgggtaccaagtgggatgcgcccttacaataaagctgttcgccccaaactcctccaaatggatcccaacttcttgtaattttttagtttgttccttcaacttaatcgcatcattattgggataatctaagacgatcggtaccaataattcttgcaaatcgtcgctcacttctccgattttttcccgaaaatattcatatttgatccgttcttgggccgcatgctggtccacgatataaagtccttcgtcgctttgagcaaacaggtacgtcccatgcatctgtccgaaatattctaaatgagggaaacgttgcttggcaggcgtttcttctaacaaacgatccacatatttcgtatagtttttctgtccggcatgcagttcaggatgcagccgttcttgcgcctgctcttcgattaacgacaagtcctgctgactggcatcctcgagaacagacgctgctggttgatcaacttcttggacaatctctgtcacaggtactgtcgcagcaaagggatctcgcaacgttttattgggcagtgtttcttccagactatcgaaaactgcttgattttccacagaatatgccgaagactccggagccttttccctttgctccgcgctttctggaagttttccaccttcctccacagggttttccacaaagttatccacagtctgttgataacctgatgacgccacttgaaactttcctgtctcgcggttgaaagttaatcccgaagaagtcgtaggactcgttcccagatccagtttcgtttgttccacaggttcagtggtcacttttttcttaaaacgaagattatcggcagcattcggaatcaaattctcgtctcgcaaactgtcattgatcgatttactgatcaatttggtcagttcttcttcttttgataaacgtacttcttgtttagtggggtgaacattgacatcgactaataatggatccatcgtgatctccaggaccgcaatcgggaatcgtcccaccatcaattttgagccatatccagcaacgattgctttattcaaggcaaaattccgaatgcatcgtccattgatgatcgtggatagataattacggctagcccgggtcacttcaggcaacgagacataaccagtcagcttaaaatcaagatcttcactgttgatagctaacatttttttagcagtctcaacaccatagatcccggcgatggtttgtttcaaatccccgctaccagtagtagtcagcattttattgccttcatggaccaagcgaaaagcaacttccgggtgactcaatgcaatacggttcacgatatcgccgatattggccaattctgtctgcaatgttttgacatatttcaagcgcgctggcgtattataaaaaaggttttctacagtgatcttcgttccttgccgcaagttcgctggtatatgttcttccacagtgcctcccttcaaccgaaggaatgagccttgggaagcatctttgacagctgtttcgattgttaaaatcgagactgaggcaatacttggcaatgcctcaccgcgaaagccaagtgtccgtatccgaaacaagtcatcgcggttatggatcttactggtggcatggcgcttgaaggccgtaacgacatcttcttcggcaatcccctcgccattatcgatcacctggattttgcgtagaccggcttcttcaatgaagatatcgatctgtgtgctgccggcatccactgcattttccacaagttctttgacaacagaggctggccgttccacgacttcaccggcagcgatttgattcgctagacgttcagataattcttggatcttgcccatctgttttccttctttctagattcgtttttgcaattcataaagcttatttaacgcatccattggggtcatttctaagagattcagttttttcaactgatcgatgacgccaacttcttctgtggacacctcgctaaacaatgaaagctgttgtgtttcttctatcacaggcttttcgatcgttggttcatgttcttccagagctttcaagatcgttgccgcccgttgtagtaatccgctaggcagtcctgcaattttcgccacatggattccgtagctcttgtctgccggaccttccatcattttatgcaggaagacaacttcaccgtctttttctaccgctcctacatgaatgttccgcaaacgcagtaattcttcgtccaatatggtcagttcgtgataatgggtcgaaaaaagggtcttcgctttgacttctttatggatatattcaatgatggcttgagcaagtgccatcccatcataggtggctgttccacgccctaattcatcgaataggatcaaactgtttggtgtggcatgacgcaacgcctgattggcttccatcatctcgaccatgaatgtactttgtccagcaatcaagtcatcgctggcaccgattcgggtaaagatgcggtcaaaaatcggcatttctgctgattgcgcaggaacaaaacaaccgatttgagccataatcactaacagtgccaattgccgcatatacgtactcttaccagacatattcggtccagtgatcagtaaaatatcggtgtcttcatgcatcacgatgctattaggaatatattcttggtgccccagcactttttccacaacgggatgacgcccatcgatgatattcaaggagcgctcttttttcaaaactggccgtacatattgatagcgttcagcaattgtcgcaaaactttgtaacacatcgactgcactaatggctttggctaatttctgcaagcgaaggatactttttttcacttcttctcgtacttccaagaacaattggtattccagatccaccgatttttcttccgcttctaaaatcactgtttccagcttctttaattcaggtgaaataaaacgctccgcattagcaagggtctgttttcgttcataacggccttcttcgagaccagccagattggctttggtgatttcgatgtaataaccaaaaacacggttgaagcccacttttaaattcttgatgcctgtttcttggcgttctttggcttctaactcagctagccactgcttgccgttgcgcatcgcttcccgatacttgtctagttgttcgtgaaagccatctttgatgacatttccttcagtgatctgcagcggtgcgtcttcatcgatggcgctatcgatcaatgccactaactcatccagtggctccaattcgatcaacaggtcattccactctccacgattgatgcctttgatcaactgggcgatcagaggaacttgctgcaaagaagatttcagctgcagaagatcccgtccattgacattgccaaaggcaactcgcccaactaagcgctccatgtcatatacttttgtcagtgcgtcttgtaagtctgctcgttcaaaaaagctgtccaacaatgattgaaccatttcttgacgtgcaaagatcttctttggttggatcaaaggacgatccaaccactgcttcaataaacgggcacccattgctgttttggtttcatctaataaccataagagtgttccatgctttttgccagttcgaatggatcgactcaattcgagattgaactttgagtaatagtccattttcaaagaatgatctggttgatattctactgcttgctggatatgagccaagctgcgtttttgggtgattgcgagataactcaataatttgccagtgaccgtcttttcatcttcaggcaatccgctagtcaaaaaacggaattcagcattttcttcatatgtctcttgttttgaaaaaacaacactcaagcgagtggtcaacagttctttaagggagtcaggaacttcgctgcacaaaacgacttccttggtttgtaaggcagcggcctcattcaataccgcatcctcgtcttctaaaagcgcggtctttaactcaccggtactcaagtctgcataagcaaaactgtaaccttgcgtcgttttcatcacagccgtcaagaagttattatctttggcggacagccctttgctatccatcactgtccctggagtgatcaattgaacgacttcccgtttgaccattcctttggtggttttgggatcttcgacttgttcacagatggcgactttatagccttgttcgatcaacgtatcaatgtaattactggcggcatgataagggactccgcacattgggatcggttcttccgcatttttgttgcggcttgtcaatgtcagctccaagatttgtgcagctttgatcgcatcttcattgaacagttcatagaaatctcccagacgatagaacaaaaaagcatcttggtattgtgccttgatgcttaaatattgttccatcataggagtgtttttagttttttgaggcatgagcatcttcctcctcgatggctttattcacttgcttttggatttctgttgtgacgtagtgcagcaattcatctgcttcctgaagtgccgcacgataggcgatcacgagtggatgctggtcatattgttgggtcaactcagccactcgtcgcaaagcatccttttttgcttccggtttatcataatgttcatactgaacgatttctttttgggtttgcttgattgcttcttctaactccagcagcttttgattcttttgcgcccgttgttgaatcctttgaaactcttgtactaccgggtgttgtgccaataattgccgcaacgcagccaattcttgtgctactgctgtttctttttctaatgggtccatgattctcctattctgtaaaaggccggtcttcgctgatttggattggacgaatcgatttggcttttccagtttgttcatcgatctcgatcagacaagcggacaaaatactgcgtccgttctcgatcacttcaaagcgttgcggcaatgccgtcaagaatttttcgatgataggttctcgtttcatccctaaaatcccatcataaggaccagtcattcctacatctgacaaataagccgttccttgtggcaaaattcgggcatcattggtttgtacgtgggtgtgtgtgccgacgactgcagaaactcgtccgtctagataccagcccatggcttgtttctcactcgttgtctcaccatgaaaatcaacaaagataaatggtgtacgcttgcgggcgatagtcaccaactcatccattttacgaaaagggtcatcaatgtcgaccatgaaagagcgtgcttgcatattgatgactgctaattcgatcgcattgactttcacaaagaccattcctgtaccaggagtcccttctggaaaatttgccggacgaatcattttttttgcatcaccaataaattcaaaaatatctcgattatcccatgtatgatttcctagtgtgatcacatcgacgccatcttgaagaaatttcttataaattttccccgtgatcccccgacccgcagctgcattctcgccatttgcgatcgtcacttgcggccgataggctttcttcaattttggtaaatactctgtcaaggtatttctccctaacgatccaaccacatctccaataaataatacccgcacactttttcctcttctcttttaacatctttctttattataagtgtttttcttgagaaaaaaaagagctattccataacagcaaacaaccttaaactacaggaattccttcctaccgactgctcttgttgctcttctaggaccctttagaaaataaaacactctccaaacaacgttggtcgtttggagagtcatcattattcagcaacacgtttcacgatcgcaacgattaagtcccgcgcctttgccatcgcttcaacagtgataaattcatattgaccgtggaaattctcgccgccggtaaatagattaggggttgggatccctttgtaagtgattttggacccatctgtgccgccgcgaaaaggggcttcgatcggtgtgatccctaagtctttcattgcttgacgagcaatgataacactttgaggattttctttgattcggtcgcccatattgtagtattgatcatacagctgataggtgatccgctcaccatagtactcattcaacttttcaatgatctgcaccatcttctccttgcgcttttggaaaagcgtttgatcgtgatcacgaatgatgtaggagagttctgcttgcccgatatgtccagaaagattgtgaagtaagtaaaagccttgatagtcttttgttttttccgggacttctgcttgcggcagtgccgcatcgatctggttggcgatctttaatgcattgacgagacgaccataagccgtcccaggatggacgcttgttccgttgatttggatatcgatccgcgcagcattaaaggtttcatactccatatgtcccacacgaccactgtccattgtataagcaaaagccactgggaaatcggctgggtcaaacagatccgcccctttcccaatttcttcatccggaccaaaagcgatccagacatctccccgttcttgtggatcaatcgtttgtaaaatccgcaatgcatcgatgatctcagcaatcccggctttatcgtctgcacctaggagcgtcgttccatctgtagtgatcaacgtctcacctatgtagtctttgaggttaggaaactcagcgactgtcatcatgatccccaacggctcattgaggcaaacgtctttgccatcataattttcatggatctggggttggatgttttcggctgcaaaatcagcggtgtctacatgtgcgataaatccgacagccgttttgtccggatttcctgcaagacgtccgatcacaaagctattcttttcatggtacaacacatcgttaagccccatagactgcaattgatcccgtaataaaagtgccagctcaacttgtccaagggtagtaggaattgtttggctgcttgcatcggaacgggtattgattttggcataacgcaaaaaatcggcgatcattggtttgtccttcactttcgtcacttccttcaaaaagataatggtcgatggtccgtttcatggatgatctgtcggaaatctgcaaatcctgcatctaatcctcggagcagcatttctgctgtaccgatattcgtagccaacgggatttcataaacatctgacagacggatcaatgcggtcacatccggctcatgtggttgcgctgccaatggatcgcgcaaaaaaatcaccatatccaacgcatcctccgaaatcatcgccccaatttgttgatcgcctcctaaaggaccagacttatagcgatgaacggatagtcccgtagcttcttggattcgttttcctgttgttcctgtggcatataattgatgctgtgccaagatttcgcgataagcggtgaccatcttcaccatcaattcttttttgcggtcatgggctatcaatgctattttcatcttcactcctcctcttttttccattgtaccaatacttgctgaaaaaaagaaactgtgctcccaagaataagacattgcctaatcttacacagagcttccatcatagaatcaaccggatcccttagtaaaataggtaggctgccaccttaagaaggggcaccgaaggaaatccttctggcaatttgcggggctgatttctctgatttggctgttgcaaaaaatttcaggtttgtctgtttcttaggacacagtttgtttaaatcaagtctagttctttcaatgcttgccagatgccatcctcatcattgctggcggtgactttatcagcaatcgcttgaatctcgggagccgcgttacccatggccacgccgacgccggcagcttgcagcatttcgcgatcattttggccatcgccaaaacaaatcacatctttttgtgagattcctagttggtgtgccaccgaaagaatcgtggctgcttttgaaccatcttttggcacgacatcgacactgttttcatgccagcgaacaaaacgtaatttactgtagcgatcgtcaaaatagtcttcatactctttcccataaaaagccaacgcttgatagacttctttttcttccggaaagtgcatgtctaattcaggcaattgtgcgccaaaagagcgcattgcttcatccatgatgccaatatttaaagaagaagctcgtttagccgtatccattcccacaaatgcggtatcgatccctaactcgtttgcttcagcaacaaatgcttttagctgttcttcatctaataaatttttgtacacttgttggtgtgccaaaaatgcagcagcgccattgcataaaatataattatcaaaagcaagggagcggatgatgtctttcgcatggaaacgactgcggcctgtagcaactgtcacgaaatgcccagcatttcgcagcaactccaatgcttcaatcgtactttccaacggttgcttgttcgaatccagtaacgtgccatcaatatcaaaagcaaagaatttccgattcatatccataaaaaactaagactctctttctgtaagaaataacaagaatttttacttttggatcatgttctctccaaaaagcataccctattcttaacataaaaagctgtctatttcaataagtggcggatcttggtgaatgactcttgcttaccaatgaaggtggctcattttttggggaaactgaaatattttcaaccacatgaagtgtttgcctcaatcgtctttgtctatttggcagtgactggttgagtgccccagacttcatctgccacttcaatgatcagctgcaatttcttccattgatcttcttctgacagaatgttgccctcctctgttgaagcaaagccacactgcggactcaagctcaaacgctctaagggcacgtattggctggcttctttgatccgggcaatcaagctttctttctcttccagagccccatttttacttgtgactagaccgagaacaactttctttgtttctgggacaaatcgcaatggctggaagtccccagagcgatcatcatcaaactccaagaaaaaggcttcgaccgcttcatgtcccaacagcgaatccgcaactggctcatagcctcccgatgccgcccatgtcgaatggtaattgccacggcaaacatgggtagtcacgtgcaggtcgttaggcagatccaccaatgcactgttattcaaccgcagatacaattcttgtaatttttgtgtatcatactcatcgttggtccttgactgccagtaatttttgtccaccagcatcccccacgtacagtcatccaattttagatgacgacagccaagatcatacaaggctaaaatggtttcacgataggcttgcgcaatatcagcaagcaatacttcccgatccggatagatagcgttcactttttcttcgttgctgcctcgaacaagttcgacaaacaattgagcaggcgctgggatactctggcgaacaggcaccccatctgcttgagccgcgacaaagcgatattcctcaaacacgggatgttctggattgaatgcgactttcccagctaatcgtgcagaatcagcacgggtttcttccccatggaacaagtagccttgatccatcaaaatatgctctattccttgaaatccccagaaaaaatccaagtgccaataactacggcgaaattcgccatcgctgacatatttcaagccaacttctttttgttttgcgactaactcactgatcgcctgatcctcaacttcttttaactcggatcgagtgatttttccttcagcgaacgcttcccttgcttgcttcaacttctccggacgcaaaaaacttcctacaatttcataatgattgatcacttggcacatagtttctcctccttttttgggtaaaaaaaaatccttaagagttatctcttaaggatgtaataaatttacatggtaccaccttagtttgcatccgacttacgaagaatgcctctactccaatgcgacgctgttgcgtgatattggggtctcagtaacggggacatccgtgcgcttctaaaacttgcgttctcgaaacacccactcaaaagccattttcagattcgttttctttcaccctttttcagctgtcggggctctctgttagaaattccacagaatcttactttctttttctacgtgtttacttattgatttttaacaaggatagcagaatgattttagtgtgtcaatattgattttaaaaaaaagaagcattgctgcttctttcttcgtttaatccacataagttgattttgattgattgagccatgcatagcccagacccatgatcaagccgccaccgatatagttcccgataaaggcaaagacaagattgtgaatcacgctgccgacagtcataccagctaagtggccgccagatgcccagaaagctaacgtaaacgctgggaagttagcgatgacgtgttcatagcctaagaaggcaaagataaagataatgaaaataatcgcagctactttccctgcatcatctttcatccgcatacttactaaaacagctgtattaacgacaatgtttgcgaacattgcttcgacgacgatttggagtgtcggcttatcaagttttgcggtaatggaagtcaataagaaattatccgcaggcaacccttgaaaaggtccagtcaaagaaataattgatccaaaaatcaaaccaccgactaaattgaagagcacacaagtgaacaaaatcttcaatgccaaaggaacactcaatcgtttgcgataaacaccgacggtcatatacaacatatttgatgtgcctaattctgcgttcatatataagatcatgacaagggaccaactaaacataaatgcatacaacatttttcctagtccatgtgcaatgtcctcacctttcatagcaatcgcaaaggcaatcgctgttcctagcgtcaagaaaagacatgccatcatggcccgtacagcatagcgtaaataactgcttttgatcaaatcgaccttcttttcaatggaagaatcaattttttcaaataatggggatactggattcatttttctgctcctttttatgggtatgataattgagttcgttataaagtacacaataccttcacattttaataaccaaacgcctatttgtaaagtgttttctgaaaaacgttactttttatatgaaattttcatcacattttcattgcaattgaattcaatcataccttgacttttcctcttattttatcgtatactgttccttgtgtaaaataatgcagcagggaaataacagctcgtcaccagttcgttgcctaaaaggttcaattgcgtaaccgcggctgcaaaggtgaagattgaagaacgaactgcacggatgtgaatttttcaacggattattttactccaaactatatttattggaggaactaaattatgtctcgttatacaggaccatcatggaaaatttctcgtcgtttaggaatttctctttcagaaactggtaaagaattggcacgtcgtccttacgctccaggacaacacggaccaaacagccgtggcaaaaaatcagaatacggtatgcaattgactgaaaaacaaaaacttcgtcatatgtatggcatgaacgaacgtcaattccgtacattgtttatcaaagcaagcaaaatcaaagaaggtaaacacggtgttaacttcatgatcttgttagaacaacgtttggataacgtcgtttaccgtttaggtcttgcaactactcgtcgtcaagcacgtcaattagtaaaccatggccacattttagtagatggcaaacgtgtagatatcccttcttaccatgttgaagttggtcaagtgatcagcgttcgtgaaaaatcacaaaacatctcaacaatcaaagaagcaatcgaagcaactactggtcgtacagcatttgtaagctttgatgatgaaaaattagaaggttcattgactcgtttaccagaacgcgatgaattgactgcagaagttgacgaagcactagtcgttgaattctacaaccaaaaactataagaattttcaccagaagctgcgacagaaatcttgtcacagcttctttttttataaattgttagaaataacttcttcggaaagaagtcaaaatttcacagaaatccgacaagcaattttcgaactctccttttcatctctcttgaagcagactacttctgacatgacctcttttttgagaaatcaaaaaaactgtgctggtttcccgaaggaaataccacacagttcgcgattaatcggcaggtcgacttcaaataatattgacgacggactctccggatgaatttttttgatgatagttgaacaacagcaaatctttctgacgctttttaaagattactttccgaatattgcgtggcacaaatttgcggatatcatcttcattatatcctacttgcagtttgtcgccatcaacaatgatgggacgtttcaataaattcgggtattgctcaatcaacgctaataattcttctaatttcaagtcatccaaatcaatggctaatttttgatacacttttgaacgtgttgagataatatcttctgtcccgttttttgtcaaagaaagaatttccagtagttcatcactatttaatggatcgctaaaaatgtttctttctttgaagggtagttcattttcggtcaaccaagcccgcgctttgcgacatgatgtacagctaggcgttgtgtatagtgaaatcattgatcattcttcctttctgatttttctgcggattcttattgattatctgtgattttttcgatcgtttcttgtttgacgacatccacgatgcgaatgttgatttctttgacttctaaagcagtcaaccgactaacttcttgcaaaacaatttcttggatctgagcaaacaaccggggaatatccttcccgtaggcaacaataacttccaaatcaattgctacttgttctttgccaacttccacttcgatccccgatgtcacattgctctggtcggccaaatcttccgtcatacttgaaaaaaattttccatctgcactgattaagccatcaattgacgccaaggctacacctacgatcgtctgcaagactttctcctcaaaggtaagcgaagcagtctctacatttgccgcttgttcattttccatttttcacactccttgtttgcatttctgaaaaaagaacgttttttttagtaacagatccaccaaaaccaacaaccttttgcggttatctgccaccataggtaaaaatcccctcctctattagcatagaagttttttgttttttttacaaagaaaaacacttgttaccggatactttttttgcaaattaccgaaataaggtacgtttttttaatataaaaaagcgattccagaaaatattttcctcgatcacttcttatattttatctgatttatctaaaaagattcttcctcaatcctaccgctcattcaaccttgtatagctccggtcagaagacacttccttataagctggtcgcatgattttttgggcattgactaattcttcgattcgatgagcagaccagccgacgattcgcgcaatcgcaaacatcggtgtgtaaagttcttctggcaagtctaacattttataaacaaagccgctgaaaaaatcaatgttcgcactgacgcctttatacatttttcgtttttgagcaatcacttctggagcgattcgttcaacagttgtgtaaagttgatattcttgccaagcgccgatgcctttctcttgtgcgagtttggctacataatttttaaaaattgccgctcgaggatcattgtcactgtagacagcatgtcccataccatagatcaagcccttgcgatcaaaaacttctttatccaaaactgcttctaaataacgacgaactgcagcttcatctgttgtatcagcaatctggcgtttcagatcactcatcatctccgtcactttgatattggctccaccgtgtttaggcccttttagcgaccctaatgcggctgcgatcgtcgaataagtatcggtaccgctagaagtaactacccgagtagtaaaggtcgagttgtttccgcccccatgttccatatgaagcaccagcgccatatccaaggtttgagcttcttgaaaactataggctttattaggacgcagcatggtcaaaatcgtttctgccgtgcttaattcctccgaagggcgatgaatatacatacttccctcttgattgtagtgattataggcgtggtaagcgtagatcgccagcagtggaaagacactgatcagcatcaaactttgctctaatacattctcaatactgacatcatcggcttgcggatcataactggctaatgtcaaaatactgcgagataaactattcatgatatccgcagaaggtgctttcatgatcacgtcacgaacaaaattggttggaagcgtacgtttatccgccaataactgacgaaatccctgcaattcagataactttggcagctcgccaaaaagtaataaatatgcaatctcttcaaaaccaaaccgattttcttcaacgaatcctgcaaccaattcattgatatcgattcctcgataacgtaattccccacaagcctcgaggggcttccccgccacgattttttctggataaatggtagaaatggttgttaagccggctaagacaccttttccatctaaatctctcagtccacgttttacgtcatactctgaataaagattcatatcgatttgattgtgtttctgacacaatgatgaaagatatacgatattcttttctttttctaatttttccacagccatgttacctcctaacatccttacgtaaacatgctactaacttcatttgattcaaaaaataaaaacttttaaacattatagcacgatgtttataaaatgaaatatttttcataattttaattgatttttctttttataaacgtataattattcctaatagattgatatttaaggaggatgcttatgaattggcacacaaacctgatcgtgaatgatcagcgctatacgtttattgatttagcaaaggtcgcggctgactttaacgctgaattaaaaagattgccttactcgattcgcgtgttactagaaagtgtcgcccgtcaccaagatgaagagatcactgctgtttacttggattatttggtcaattggaacgctgaacagcccacaggcgtcgtacctttcaaacccgaacgtgtcgttttgcaagacttcactggtgttccagcggtcgtagaccttgctgcgatgcgagacgccatcgttgccttaggcgggaatgcagatacaatcaatcctgagattcccgtgactttggttgtcgatcattccgtccaagtcgattgtgcagggactccggaagcagtggctttcaatacggcgcgtgaatttgaacgaaaccaagagcgctaccaattcttgaagtgggctcagggttcatttgacaattttgaagtcgtccctccagagaccggtatcatccatcaagtaaatattgaatcactttctgatgtgattttggaaaaaaaaattgctggcgagccgtttctttttccggatacattgcaaggaacagattcccatacaacgatgatcaatggtctcggtgtattgggctggggcgttggcggtatcgaggcagaagcagcgattttgggcgagccgtcatttttcccgactccagaagttatcggtgtctgttttgtgaacgaaatgcctgccggtacgaccgcaactgatttggcgttgactgttactgaagtcttgcgaaaggagcaagtggtaggaaaatttgttgaatatttcggaaccggttaccaacggttaagtttagctgaccgtgcgacccttgccaatatggcaccagaatatggcgccacttgcggtttttgtccaattgatgaagagaccctcaactatttagctactacgggacgaacacccgaattgatccataaggttgctgcctacacaaaagccaatcatctcttttatgatgcgacggagataccagactacaccaaaacggtcaccatcgatctagccaagatccagcccgcattggcaggaccaaaacgaccacaggaccgtatcttattaccggaagttggcactgatttcgatcgttccctcacggctgacatcggaccaaaaggcttcggtctttcggagaaggaatggcaaaaaagcagccaagttaactggccaaacgagccttccgaaacattgcagacaggagatatcgtacttgcagctatcactagctgtacgaatacgagcaatcccttcgtcatgctctctgcgggattgttagcaaaaaaggcggtagaaaaaggattgaccgtgccaaaatcggtcaagacttccttggcccctggttcccagatcgtaaccacctatttgactgccagtggattattgccttatcttgaacaattaggcttttatttagttggatacggctgtacgacttgtatcggcaactccggtccattagaagcacccgtagcagaagcaatcgaaaacgaaaatttactggtcgcttctgttttatctggaaaccgcaactttgaaggtcggatccatccacagatcaaagccaattatttagcttctcctccgttagtcgtcgcctatgccattgctggaaccatccggaaagatttgacgaaggagcctctaggcgtcgtagcaggacaagaaatttatctgacggatatctggccaagtaacgaagaagtcaatgaatatattcaagcttttgttggaccagaagcgtttcgtgcagcttatgcgcatctattcgacgccaatgagcgttggaaccgtatcgatacaactgccagtgattgttatgcttgggaggacacatcaacatatattgcccacccaccctattttgattccttgaccaaagaattacctatccaaacaagtttgtctgatttgaaagtgttagccaaattgggggattctgttacgacagaccatatttctcccgctggtagcattggattagattctcccgccggcaggtttttgcaaaccaaagctgttccttaccgtgagttcaactcttttggttcacggcgaggcaatcatcacatcatgatgcggggaactttcggcaacattcgtttacagaatcagctggttcctggaagtactggcgggatcacccattattttcctacaggggaaacgatgtcaatctatgacgctgccatgaattatcagaaaaacgaacagtcttgcattattttagctggtaaagattatgggatgggttcttcccgagattgggcagctaaagggacccaacttttaggcgtcaaagtagtcttggcagaaagtttcgaacggattcatcgcagcaatttggtcatgatgggtgtgattcctctagaatatcttgctgggcaaactgccgcttccttgggattggatggctctgaatccttctttatccaactgcccgaagaaccgcaggtcaatcagcagattgatgtgacagccaaacgtacagatgaaacaatgatcacctttccgactcggctgcgtttcgatgcaccagcagatatccgttactggaaacatcaaggaatcttaccaatggtcattcgcaaaaaaatagaagcaggaggaactagcaatgcattctgaagcgtccttatctaacactgttctcacaattccttatatcagtggtgacggcattggtccagaaatttggcaagcagcgcaacctgtgattgatgcggccgtaaaacaagcgtatggtcccaaaagaaggatccactggcaagaagttttagctggtgaaaaagcatttagacaaaccggcgaatggttgccgcagtcgactcttaccactatccaagaggctaaaatcgcattgaagggaccattgaccacaccagttggcaaaggattccgatccctcaatgtcacattgcgccaaacattagacctctatgcttgtgttcggcccgttcgatactttgccggggtaccttctcctttgaagcatccggaaaagacgaatatggtgattttccgtgaaaatacagaagatgtttacgcaggaatcgaatttgcaaaaaatgatcccctcacgaaacaattaattgaggtgctgcaaacacaattcagtgtcaaaaacattcgctttccagaaagcagcgccatcgggatcaaaccgatctcaaaagagggcagtcagcggttgatcagcggagcgatcgagtatgctatcgcacaccacttgccgtctgtcacccttgttcataaagggaacatcatgaaattcaccgaaggcggcttcaaaaattggggctatcaattagcggaaacgaattatgccgatcagtgcttcacgatgaaccaatgggcaacaattaaatctgagcagaatattgaagcggctcaagcagcacttgctgctgcacaacaagccggaaaagtcattatcaatgatgtgatcgcagataatttcctgcaacagattcttttgtacccagaaaaattttcagtgatcgcaacttgcaatctcaatggcgactatctttccgacgcattagccgctcaagtcggcggaattgggatcgctccaggtgcaaatatcaattatgtaagtggtgccgcaatctttgaagcaacccacggtactgcccccgatatcgttgacacaggaaaagccaatccctgctcgttgttgctctctgcttgtatgctcttggaatatatccagtgggatgaagcagcagttcttattaccacagccatcgagacagcaatcaaggaaaagaaagtcacaactgactttgcggcagctatgactgacgcgcattgtttgtctaccaaagcgttcggtgactatctggtcacattgatcactccataatcattcaccgctctcgttgacttgtcattttagacaactcaacgagggcttgaatttttttgagacaactcaacgaaggcttgattgtatttcagttgctagttcccctatactggagacacgaaaggaggagttcacatgaatgaattcaacatacggcaaatcggccaacggattgccagcaaacgtcgagaactaaatatgactcaaagcaacttagcagatcaattattggtcagttatcaagctatcagcaattgggagcgaggcaatacattgcctgacatcgaaaaattgccccagctagcaacaattttgcagttatccattgacgaactattaggaaatagcggagttgcagtaatgcattaccacgagggagtcgccgattctcaggaaatcaccacgttggcgccgatcattaaacctaaagaattggcagctgcgactcaagcccagccttttgaacttgagttagtggagcaattggcaccttttttgagcagtgaagaattatttgctttattgaaacctataacagaaccgctgaccgaagaagcactagaagaatttttaccttttttagagacagatcatttggaacaattgatgaaagaggactatactttcgcttttctggaagaagcagcgccctacttatctgccactttcttagcccaaaaagttgagcaggctgtctcaaactcgctgtctttgtacgagttggaagatattgccccttttctcgaaaagcaagatctaggacgcattcttcaaaagatcctggcagcgtcagagaatccggagcaacggttgtcagagcttgaagacctgctaccttttctcgatgaatctacgttagtaacgcttgtcggatactttcctgtatcctctgaggtttttgaactgtttaccccttttttggctacagaaactttgttgcaagcgttgcgaaaaaaacgttgatttactctttacttttcgttaaccaagatttataatttcgttaaccaactattggattatgtgttaacgaaagaaggatactatgaaactaccattgcgagaacaaatctatgctgctttttttgccatcattattgctgggctgtctcaactaaccatcccattaggattgattcctctgacaggccaaacctttgctgtcggcttggcggtaacctttctaggaatgcgcacagggaccatgtcgatccttatttacttattgctggggttgatcggattaccagtttttgccggcggagcaagtggcatcggcgtcttattcggacctacaggcggctatctgattggttttatctttaatggactcttgacggggaaacttttggaaacaggccgcgccggatatgtgagagggatgttagcgaatatcgctggtgcattagcaacattgttttttggtaccttatggttaaaatggagcaccgctatgtcttggactgctgccatcaatggcggttttgttctcttccttctgcccggtgtgatcaaagccattgctgcggcttatttagggattttcttgcggaaaagattgcagcggtaaaaaaagagaaagtagcaaacgtggactgcttcaagcaataaaaaggaattgccgaaaattgctgttttatttttttgaaatttctgcttatttccgaagaagctactgttagtcgtttattcgaaaaaaagagggactgtgccataagtcatcatccaacaagttaaaccgaataatagtctgttgctaggatagattcctctgacttttgcgacgaggagtccctgcaccgcaggagcaataatcattaatgttcggatagttttacttgtaggagacttatgacacagtcccgcacgcttttatctcgtagcgaatcaatagttgatccatgtgattgcttgctggagctctgctcttaaatgggctgctttgtattgattgaacgctgcttgattagttcgcaaaagtccccgtagctttgttggctgaaaattttctgtcaactgattttccagaacaaatcgtcgggtcaattgccattcatagtaatagcccaaaggacgacagctataaatcgtctgtccaatcacttgatcttcaaaccgacgatgggtatgaccaaagactacttgacgcacattgtccgcctcatcaataactgccccaaattctggtgaacctagaaacgcgttcaaatgattccaacgaacatacttccccgtttgtttgacgataaaggttgctttcggaacaaaatgagtcgttacgatgacttctttatcttgagggagccctcgcaatgtttgacgcagtctttcattgatctgatgactgatttccggatcggttcctgtccgctgaatcatacgatcataccaaaagaggtgcttgagacgaaggatctcttctgtgctttgcaagtcagaatagccgtagtcataccagccattgacacctaacaagagtgttttttccgataaagcgactgtttgaaagttcaagaaagctggatcaggataggtttcgatcaatgattctgataaatcagccatttcatgattgccccaatgaaaggtagtaggcagctgtctttgaaagaaatcaatgacggtcatcgctgctgtctctttgtttgcaatatctccagctagatgcaagtgcgtcgcttgattggcgtctagcaattcggctatcagctgcaagtctgttgcactgaaatgattgatatcgacatgcaaatcgctgataacggctaatttccccatatcagtttcctgccacctttttgtccatgcgcaacagttgaacgttagatgccagcagaccgctgtcactagtcaactgcaagcgctgatagtcaggatcgaccaccaagcgtgtccgctcttctaaatacattgctgcgccttgttttaaccaaactgttccaattgctgtatccagcttcgtatcatagatagacaatccttcttctggataatctgctggtacgaggatcaagcgaaaactaatatctaaccggcaagagatcgccgtagccggaaaaggtcccacaccatcttcaaaatctagataaattcgatctccctcctgtttgacttctgagatttttgctactgctgctgcatccatatcaatcgttatttccatagcgattctcctttacatgattcgtttttgccactcgtctcgggtaattccccgcatcacttcgtccactacttgcccacgaaatcttcgcgcagccggaatctgtgcttccactttcatgccaattttttccatcacgcgaccagatcgatgatttcgctgatcgtgcagtgcataaatacgaacaagcgctaatttttcaaaacccaaagacaaaagcatccgagcagcttccggtacgatcccttgcccccagaaagctttattcaaggtatagcctagttctgccacttcctttagcgggtccacccgcaagtcgatcgttccgatcatattgccactcattttctcttcaatagcaaatttacctaatggcgccgctaaaaaatacattgcaatggcgatttttgtatccacaagtgattgatgcctcggaaaaacaaactccgtcgtttcttcatcacttgcgtattcgaataaatcattggcatctgccatcgtcacaggacgcaaccataatcgtggtgtctcgattcgttgattttctgctaaaatcaataagtggttcttttggatttccatgtttcaccagctttctttctgatcttttttagtctttcttatgacctcactgaaatagctaaatgtttctaataatcgacgctcccttttttgtgctataatataaagcaagaaaacgcttaggaggattttcaatgtccgatgaattggagaaacgcctagatacaggaatgtacgggacacctcgtgttaatccagatgaacaaagaaaatacttgggaacgtttcgtgaacgttgttatctaagtatgacggtagcagaaatgaagaaaaaggacaaccaagaaacgttacagtcggttctccctaactatcaaggggcactgatcttgatcaacggaaaattgcccgaaacgcttcagacgacctttatttcattgattacgaaacaacagctcgattttcgagtggtgactgacgcccagactgctgatcctgacagtatcggtttactgatcgttgccaatgaggcagtgaatgaagaggtaatcgatatcgaagaaaagtatcctcaaaagacaaaatcatcttccgaagaagatcccatcaaagaaaaaaaaccattctgggaacgattcttccgctaaacaaaccaacggatcaattactagtgatccttcactagtacgaacagcaaaagaagttgtattagaaatggtcagctttaagatatttcggcttatttccgaagaagctacttctaaccatttattctaaaaaaaggaacagtgacaaaagccttgtcactgttcctttttcaacttctgactgttaagcggctgttaaaatcgttccggaaaaagcagcttgaggacagacatggttaagcggcggctttgtccttggtacgggtaaatatgcatatgcatagcgggattgaagttcgcttcaataatgccgtatgctcccggatcctccgcgggcttttccttgtcaggaataatcaaatcaatcccactgattcgtgcctgtaatgcggtcacggcatctgcagcgatttttttgtagtcatcattaaattgatcggtgacatcgatcgaatcgccgcccgtgctgatattggaattttcccgcaagtaaacgatttgtcctttttctgggacagaatctatgtgatagccttgctctttcaacatcaactgttccaattcacctaattggatcttctccaacggtgtccgatggtgggtcccccgtaatggatcggtatttttctctgcaactaattccttgatcgtgcgccgaccatctcctattacatttgccggtattcgtagcaaaattgcttcaacttgaccatcgatcacaaagaaacgatactctgttccagcaaggaatgcttcaactaaaatcgactggtcttcagcaaaagctaaacggacagcagcttgatagtcctccaacgaagcgccatccttaaagatcgagattcccacgccatagttggttgttttgggtttgacgacaaaacctctgtcagcaaattgcgggtaagcagcaagcgccttttctacagtggcgaattctgctcctgcaggaacccgaaaaccattctcagctaaaatcttttttgtgaccgttttattggccatgatcaaaggaacgatataacgatccttacttgtcatattagcgtttttgacatattcaacatgttcatcgatcgataatttcaagaactgatcagattcatccaacacttccaccttgattcccttttgaatcgcatcgaacatcaaaatttgtgttgacagttccatgttggtgaagcctgctaactgataaggtttttcccaagcaacttgatgataggatactcctagttcagttgccacttgagcctgacttgacctttggctggcttgatataaacgaccggcaaaagttttgccgggatcttccaacattggcagcagttgatccagtaaaggcattgtcggcagactgatttcctttgcaaaagcgatcaattcttccgcaactactttagcttcttcaagatagatcgtttgattcaatgggtgttccaatgccacttgattgtttttgcgatttccttcttcgacccaagcatcggcatcagcgccctcctctttcgttgctaagtataacaagaaaaggtgcagaaatttcacttgatcttgcgaaataccatacatttcaaagggattgatatcaatattgcgtaattcaatgtaacgaattcccgctgttgctaagtcggcaaccttttgcccccctcgcaggcgaactggtgcataaaactctttttcctcagatagtttgccagtttctaccagctcagcgatatccgccagataggtctcaagagaggcataagacacgttgacatcggtatgattcgtgtagccatagcggctgttacgaatgctgcggacaggttcttgcggtccagaacccgccataaaataattggcttccgtttgcggcgttgctccaaagaaataagtcaaaaaccagcggtaatgcaagtaatttcgggtaactttcaagtaaagttctgttttaaacctacgataatctgtttctgacgacttggtaaataactttcttaaaaaatcatccccaaattcaaaattgaagtggatgccgctgaccatttgcttacgacgcccatacgtccttgccaaaaaccgacgataaagaacatcttcaaaacgatccagctttgcgatcacgatatcctcttctttttccggcaacgcaggcggcatacttaatggccaaagcatctcctcaggtgccatcgaacgataagcaacatcatggatcgcagccagataacgaaatagttcctctgagctttccgcgactggcgtgatcaattccaactgattttcagcaaaatcggtttgtatgtacggatgaaaactacgattgcctaatgcttcaggatgatctgtcccagcaaaacttccgtctaaacgtgcacgctgcgcctcacgttcgatcccataacgcccatcaaataagtagggacgcagttcttcttgtataaaaagtgattttagtgtcatatcattgccctctttgtcttagattcttccttattatagtcaataatccagcagaaaaaaatgaaattgtgcgattctctttgctagttttttaaaaattaccaagtttttacaaattacttgaataaatttgatatttgacctctaaataaagtatacttactatataatagtaaattattatgtcaatattacaacttttttgaaaggaagaatagtgaatgaaaccactcaatcttaccaaacgcgaacgtcagatcatgaatatcttctggaatgctgaaaaacctttgtctgcaaatgacattgcggttcaacaacaggacttaagtaaaaacacgatccaagccgttgtccgaaaattaaagaaccatgatttattgaaagtagctgacatcggctacagcggtactgtcttgacccgcttgtattctccaaatgtttctcaagaagattttctagctgccgaactctctgaacaatcgttgctgaatctagtctcgaatttcattgaaaacagtgaggatgccgagacattgaatgatttggaaaaaatcatcaaagagcggcaagcacagctaaaaaactgatttctgaaacaagttgttcttgttcacagagaaatgtccacgctgaacatttctgacaagacaaggaatctttcttggaatgatttcaatttcaggaacagcagctacatccttttagctgctgatggggaggttttgtgaaccagaagtcacacgtcatctgttacgtattctgctgtggtacttcatgtacatcgcagctgtcaaacaaacgtatgcctataaagtttatttccataaccgatgagctttatgcaagttccttaacaaaaaatatccgaactactactgattactcctaccgttaacgccatcgcgagatgatgaagaggaataatcaaacatagttcggatatttttgtcttatttcaagcgatgaacagcatcaaccttcgttgatgagacctttaaatagcccaacaacaaactcatttggatcaaacggctcaaggtcgttgattccttcccctaatccgaccaatttaaccggtaaacgcaattcattgcgaatcgctaaaacgatcccacctttggcagttccatctaatttcgtcaagaccaatcctgtaacatccgtggtttctttgaattgtttggcttggttcatcgcattctgaccagtcgtcgcatctaacacgagcaacacttcatgaggcgcattcggctctactcgttgaatgatccgtttgattttctctaactcattcatcaaattgactttattttgcaaacgaccagcggtatcaactaatagaacatctgcttgctctgctttcgctcgttccatcgcatcaaatacgacggctgccggatcaccaccagctttccctcgaacgacttccacacctgctcgatccccccaaacgacgagctgatcgattgctccagctcgaaaggtatccgcagctgccaacaacactttcttgccttctgatttgaattgatgcgccagttttccaatgctggtggttttaccgacgccattcacaccgacaaataaaatgacggtcaatccaggttgcatatttagttcgttgacttcgtcgacacccgcttcaccgtaaagatcgactagtttttcaataataacattttgaacctctgccggcttcttgacatttcgcaacttgacctcttgacgcagtgcatccgtgatcttgatcgctgcatcaaagcctacatcggctccaatcaatgtctcttcgacttcttcaaaaaaatcttcgtctacagagcgaaaattcgcgaacagctcattgagtcgttgcccgaaagttttgcgagatttcgatagtcccttcgtgtacttatcttgtacatcctctttgtgaaccgctgttggctgaggttgtacttcaggtttttttaccgtttcactaggtgtcacgacgtcgaatggttcagctgatttcagatcttgtgctccttctgatgatgaagtatcagccgcggactcctctgtttctgttggctgcaacgcggaatcggtagtagtttctggacgagaatccagtgttggttccgtcgattctactgtttgttcttgtgcggaatggtcatctgcgacggatgactcatcgacagatgactctggagattcaactagttcctctacttcgccttgcactttgtcttgctcttttgattcaccaatcaaagcttttttaattttgtcaaaaaatcccatttcaaacgcctcctttcaaaacatatttttcgatgacagttgctacaccgtctgcttcattcgaatctgttactacatctgcggcttccttgattaaaggcacggcattagccatcgctacaccgagtcctgcatagcgaatcatcggcagatcattttcttcatctccgatcgccatgacttcatcgatagtgatacctaaatcccgagccagcaattcaatcccataggctttcgtaattcctttaggcataaattccagcaaattattccgagttttgattacttcatatttctctctgattgctgaaggaattgccaaaatcttcggatccagtacttcttgatgataagcaatcacagctttattatagagtttcgactcatccagagcttctatcgcatacgggcggcaatccagcaatggattcagcgaaccatagatcgactgattcgttgctgaagtcggcaagcacaaaacgatttcttcggatacgacatccagcggcaaatccagttctgctgcgacagcaaccaattcatgaatatcagccaattgcaaagcggctttttccatgatttctcccgtatcgtttttttgcaccagaccaccattaaaagtaatgctatagtcccctgattcattcaatgacaactcttctaaataaggacgaattgcccgtaaaggacgacctgtgcaaaggacgatttttactccttgtgcttttgcttgggcaagaacttctttatttttttgcgatacttgtttctttccatccagcaaggtaccgtctaaatcaattgcgactaatttgatcattttgctactccttcttgatctgcgacaaaatttccgccttctttgacatcttccaaacgcacagaaacggtcttagatacaccggattcctgcatcgtcacgccatacaacacatctgccgcttccatggtccctttgcgatgtgtgacaacgatgaactgtgtatcattttggaagtcgcttaaataatggccaaagcgtgatacattggcttcgtctaaagcagcttcaacttcatccagcacacaaaacgggacgggacggacttgaatgatcgaaaacagcagtgcgatggctgtcagcgctcgttcgcctccagaaagtagactcaagttttgcagctttttacctggtggttgggcttcgatctcaataccagtatttagtaagtcctttggatctgtcaaaatcaattccgcatgtcccccgccgaacatattggggaaaacttgcttgaactgcagacgaatcgcatcaaaaatctcaccgaaacgtgttttgacttcttcatccatctcggacattgtatcgaataattgtgcttttgcagaaagcagatcatctctttgactggtcaagaagctgtgacgctgttccacttgatcatattgctcgatagcattcaaattgactggtccaatcgcatcgatttttccttttagatcttggatttctcgttttgcagcttccgggtcatcgattgctggatagtcattggccgctttttcaaagctcaatgcatattcttcctgcaagtaagccaaccgattatccatcaccaaatccgcgcggtttttctcaatttctacattggtcttttcggatagtttttctttttgttgcaagtttgccaaactgagagcttcatccaactgtccaatttcctgttggacgatttgtctttgttgccgaatgtccgccaattcttgtgtcagtgttatttttcgttgagtaaaatcactgatttgctgatccaggctttcttccgaaatttcatggtcactcacattcgaattgattgctgctaactgccgttctagcgactgttggcgtgcttcattctccgctaacgcttccgcattcgcagcaattttttgtcttaaatgttccacttgttctttttgaacagcaaaatcagcttgtaattgggcggctgtcgctgctaactggcttctttttgcttcgattaaatcttcttctgcattcatgctttgaatgtcgtgatcgatttttttcagctgctgcgcaatggtttgctgttccgattccaaccgagtcttcttctcgttatactcttcaaaaaaggcctgaatctcgcgattttcaaagtcaaagacttgctgctcttttctcaaccgttccaactcgttggtgaggttttgcagttgattttttagttcgtgttccgtcattcgagccgtttcaccggtggttcgcagctcttccaaggctgcttgagcatcttttgtcaccgtttcgaagtgctgcacttgtttctctgttttttgcaggcgttcatccaattgaacggcttgagccgttaattgctgcaactcattgctttgactaaataggctgccggcatttttcttcgtcgctccaccggtcatcgaacccccggcattcatcacgtcgccttccagtgaaacgacacgatagctatagttcagcgctttagctaatgcattagcacttgtcagatcttctgcgatgacgatacttcccaatagattttcggcaatgttttttacatcttcattgaaacgcaccagctcactagcaacgccgataaatcctggtacttgttgtgcttgagaaacagcataactaggtaattggcgagacttgattgtcgtcaacggcaagaatgtggcccgaccaccacgattttgtttcaaataggtaatcgctgctctggcatcacgttcggtttctactactacgtgctgggcagaagcgcccagtgctgtttcgatagcaactgtatattcttctggtacttcgatcaattctgcaacagcacccacgacaccggttagctgctgcttattttttagaactagtctgacgccttgataaaagccagcatagttttcttggatatcctgtaaactccgttgttttgcccgcacttgttggacttggttcattaactgatacatttttttctgtgcatcatcaaatttttctttgttctctttggctttctcttgtaaatggatatattgcttccgctgttcgtccaactgttgctgcacggcttgcaagcgttcattaacgatttctgcggctgtcgctttttctttgatcgctgtcgacagttctgtctgcttcgtaacggctgtttgattttttgccgattcttgctggtattggcgctcaagatatttgagctcattgccgaccgttgcttgctcctgcattgcttcaacatattgactgcgtaattcttcgatgatctctttggccgatttctgatacttttcttgttccgctcgacaatcagcaatcgctacttctgcctcttggacactgcgattcttttgcgacagttcatgaatcaattcagctttttcgtcattcaactgttggaggcgttcactgacggcatccaaggtctcttgatattctgctgtgcttttttgcgtatgcttggagcgctccaacagtacttctttttggccttcggcttgcttcagcccttccgttacttgcaacagctgctgattgagctgctccaatgattcatcgaaggctgctcgacgctgccgcaattgctgcacactgcgttcatcggtattgatttgctgcgtgatttcagccaactgatgatttaatagttccagctgttctgtagctgtttcccacgcccgtttggctgtctggatctccatgacagaaaaagccacgtctacttccgttaatttttccttcaatgacaaaaattgtttggccgcttcactttgagcagctaacggaatcaattgatcctctaactcataaataatatcttgtagacggttaaggttgtcttctgtttcaaacaatttctgttctgcttttttcttacgctgtttgtatttcaaaacaccggcagcttcttcaaaaataccgcgacgatcttctggtttgctgctgaaaatcgcttcgactttcccttgagaaataatcgaaaatgattcttttcctagcccggaatccataaagagttcctggacatctcgcaggcggcaactttgtttgttcaaataaaagtcgctttcaccggttctccttaaccggcgagtcacactgatctcactgtaatccattggtaaatagtgatcggtattatctaaaataatcgttacttccgctacatttaatggcttgcgagtgtcagatcctgcaaaaatgatatcaggcatcttgccaccacgcaggcttttggcagactgttctcctaaaacccaacgaatcgcttcagtaatattgctcttgccgctgccatttggtcctacgaccgcagtcacactattttcaaaatcaatgatcgtgcggtctgcaaaggatttgaaaccggcaatctctattcgttttaaatacactccgccattcctttcttattgatcaagacttgctaaggcattttctgccgctgcttgctctgataatttctttgattttccttgcccctcgccaatcagcacatcgtcacaatagacttctgtccaaaagattcgttcgtgggcaggaccttcttctttcgttaaacgatagttgatggacacatcgccagatcgctgcaagacttcctgcaatcgggtcttgtgatccatctcatgggaaaaagcacctgcttttacttttggaaaaacaacagccgtcaagaaaccgtcgacgctctccaaaccttgatccaagtacaacgcacctaaaaaagcttcaaaaagatcgcataacaatgagggacgcttacgtccgccagagttttcctctcctttgcctaaccgaatatattgatcaaaacggcaatctttggcaaacattgataagctatcttcgcgaacgattgctgcccgcagctttgtcaacttcccttcaggaaggtccggcagttcacggtacaaataccgtgagacgatcaattctaaaacagcatctcctagaaattctaggcgctcattatcggataggtgcaaattgcgatgctcattcacataagatgaatgcgtaaacgcttgttcgagtaaatctacatcatggaagacaatgccgtaatcctcttttaattcgttcattagctgtgtattcatttgccacattccttcattagtttatcgacacttccctattatactggtttttggctaattatgaaatgtttcgtccaaaaacttgaagcctccataaaaaaattttaaccgtttattctcctgctctttgtttccatgactgattcattgttttttattgattttgccgcgaacaaaataaaaaaagacgttcccgaaagaacgtcttttcctaaattagcgagattctgctgttacagaaactgttgcccatggattgtgatctgcatcatatgcccatgtgaaatctttgacgcgattagatactggtaatacttggttacggtaaagcgaaggaataacaaatgcttcatccgcagcgtattcttgccatgcatcaaatgcttctttacgttttgcttcatcaaatgattctttagagtcgattgcttctaatagcttcgtattttcatcagattcaaaacgagtgtagttaaatgctgagtttggtccataaagtccggttggtgaaggatctgaacctgttccccatgcaccttgatacacatcgatttcaggatcatcatttttcaatttatcatagaatgcttggaaatcaatcaaacgaccagttgtgtatttcacatctaagccgatttcattccattgttggatgtagtaatcagccaatggttgagctgtttcgccacctgacattgaagcaaaattgatggttaatttttcaccgtttttgtcttcacgcatgccgtcgccgtcaacatctttgtaaccagcatcgtctaacaatttgtttgctttgtcgatatcttgtgtgtaacctttaacttctgtatcgtgcaatgttccaaataccggtgggatcaatgttgtcgcatttgaacgtaggccattatagaaacggctaccgacagcatcattatctagtgcgtaacccattgcttgacgcaatgatttgtccgccatttttgattcaggattgtagttaacttttccttctttatcatcccaagtacctaacttaaatccaatatacgtataagcttgctcaggacggcccaagatttggtagccatctgcatctttgtaagttgggtaagtatctgttggcattgacaatgctaaatcatattgcttcgcttttaaaccttctacgattgaagctgctggaactgctttaaatgacaatttatccattttaggtttgccaccgtagtaatactcatttggtacgtattctacagattcaccggctacgatgtttgacattacgtaaggtccgaaaacgattggtgttttacgaacaggatcacttgattccatatctttgactgcaataccttcaaacgcatgttttggtaaagcagaagaccagataccgccgcctgcttgcatcataccagggtgaacttctttgtattgaattttaacgactttgtcgctttcttttgtgattcctgagattgtgtcagatttgccatcgtggtaatcttccatcccaacaatatttgtaaagttgttgtcataacggattcctgtgtaatctttgttaccgatcacttcataggagaaaatcacgtcatctgctgttacatcttcgccgtctgaccatttcaaattgtcgcgtaatgtaatcgttgctgtgttattatcttcatctaatttaagatttgcagccccaccatcaacaattcgaaaatcagcatctgttaagaataaactttcattacttggttgcatgaactgagaatcataattgtcttgataaaattcagtttggaacaaaccttggaattgtgtatccataactactgcgacgtccaatgtaccgcctttgattgcttctgcgtcatttttgacttcaaccggcatagagctaatatcttctgtttcagttgctgagttgctgccgcctgatgaatctgttccgccactattgccgccacaagctgccaatgctaagactgacaaaagtgtgaccataccaaaaatatttttcttcatcctgtatcctccttgttttaacctagtcgttgacgtgcatcggctgaacgcttaaatgcctgaccaacgtagtttatactcaacatcaatactaaaatcaatattgacgcgggtaaccatatccattgtctgttgaccagcacatcaccgctgctggcgtacccaatcaatgttcccaaacttggaacattcgttggcagaccaaagcccaagaacgttagagttgtttcgataccgatatttgctgcaaagttcatcgtcaagttggtgatgatcaatgagcttaagttcggcatgatttcgcgaaacatgatcacaaaatcattggtccctaatgtttttgacgcactcacataatctcggcgcccttcagaaagggtcttactgcggaagagtctcgcttttccgacccaataaaaggcactcatgacccagataaacgtccaaacattgtagcgaggtatgatcgaaacaataacgataatgatcaacatgatcggtaagatcatgacaaaatcgacgatacgcatcaagatattatcaatcaacccgccatagtaacctgaaatgatccccaagccaactccgacgatcgatgtaatgatcgtgatggaaaacccaatcaaaatcgaattacgcgctccaatgatcaattgtccccaaacatcacggccaccttcatccgcccctaataggtaggtgccgccatttggtgagactgctcctggtgcagcatatttatctagaatacttacatgcatgacttggctttgatcaatgactgccgagccgatgaatacgaaaagcagtactgctaccaacaagaccaacgaaaaaatagcgatcttgtcttttaaaaattcacgaaaaatcatttgtaatcccataggtgggatactttcttgttttaacactttttctttcttttcagacacgtttatcccctcctactggattctgattcttggatcaacaatactcataatgatgtctgatagcaatgtaccgatcaatgtcgccagacctaatatcaaagtcaacgaagtgatcacggcataatcccgctgtacaatactatcgataaataattttccgacacctgggtaagcaaagattttttcaatgaccactgaaccagcgatcaatgaagttatctcataccccatttgagatgcgatcggcaaggatgcatttcggaacacgtgacgtgagaagactttactagttggcacccctttcgaacgagcagttcgcacgaaatccaatgatttggaatcaatcacttcactccgcagatactggattgtcacagcggtacctaatagcgcagaagtgatagccggtaagatcagatgatacagacggctccaaaactcagccattcccgttacgcctggtgctacagaccccccagttgggaaccaacctaaacgataaccaaagataaacagtgcaatcaatgcaaagataaacaatggtaccgcaaaactaaagaagttatacacgacaacgactttatctaaaatcgaattttggtaacgtccagccaacattcctaaaggaatcgcgatcacatacgttaagataactgttaacaaagatagccacaatgtgttgctgatccgtcctgaaagtaatgttgctactggtagtttatagataaaactttgaccaaaatctcctttaagtgcatttccgatccaacggaaatattgtgtataccaaggatcattcaatccggctgcttcccgcatccgttcaataactgctggatcttggttcggattaatcaatcctgtaaatggatccccgggcattgcttgtgcaatcaagaaaattaagacactcaaaataatgacttgcgggatcattaatatcaaacgacgtagaattgttttccacattattcagcacccccatttttcaaagcgacttgatgtgtttctgtgatggttctaaggtcataaacacgacctgtttcatcatagtaatctttttggtgagtgacatattccaactctacccgacggcggttttctttatgcgcctcacgatttttcacatcaatttgaggaatagctgacaataaccgcttcgtataaatatgacgcggatcttgataaatatcttggcgtgtaccgatttcaacaaaacgacctttatacatgatggcgatattgtcgcacatgtgtttcacaacacccaagtcatgagagatgaataagaaacttaagccaaactcttgttggattcgtttcataaagttgagcacctgtgcctgtacagacaggtccaatgcagaaacaggttcatcagcaacgatcaatttagggttcgatgccactgcgcgggcaacccccaaacgttgtctctgtccaccagagaattcatgagggtatttgtataaagcatcttctggcatcccaacgatatccaaaagccgtttcacccgttgtttttcttcttggtcactcaaacgttcaaaattccgtagcggttcagcaataatatccactacccgctttttaggattcagacttgacatagaatcttgaaaaatcatttgaacatccttgttgtaattcatttttttgcggacagagcgctttgtgacatcttgtccttcgtaaatgacttcaccgctggtaatcttttccaagccaacgattgctttccctgttgttgattttccagagcctgattctcctaccagaccgtaagtttttcccttttcgatgatgaaatccacaccgtcaacagcatagacatagtccgttacgcggttgaaaaaaccgctgcgaatcggatagtggactttcagatctttgattgtgattaattctgacatctacacttctccttcttcgtctctaaaatgaaaatgcttatagcaagtacagcgaactaaatgatctggtgcaacttcatgcaggacaggattttcttcgtggtcactagctgggatccaagggatacgagcagcaaaacggcaaccagttcttggcatgtttttcaatgaaggaacgacgccttcaatcacgtgcagttcactgtcttgagaatcttcttgtggaattgagttcagcaaagagcgtgtataagggtgttttggatttgcaaacaactcttccgctgtggcaacttcaacaaactgaccgccatacataacggctacacgatcagccatttctgccactacacctaagtcatgggtgatcaaaatgattcccgtttgtgtttcagcctgcaaatctttcaacaaatctaggatctgtgcttggatggttacatccaatgcagtggttggctcatcagcaataacaattggcggtttgcatgcgatggcaatggcaatgatcacccgttgccgcatcccaccggataattcgtggggatactggcgacccacccgtgctggatttggaattcctacttgatctagtaattcaagggcccgggcttgtctctgttccgcattcatatttgtatgataagataaaccttctttgatttggtcttcaatacgcatgagtgggttcaaagcggacaatggatcttggaaaatcatcccaatgtcgttcccgcgaattttgttgtaaagtgtttcatttaagtttgacaaattcaagtctttgtataagatttcaccggtgattttggtattgtttggatcatgcaatcccataatcgttgtagctaaggtactttttccacatccggattcgcctacgatcgctaaaatctcattgcgttccaacgtaaaagaaacaccgtctacagcgtcatagtaatcatctttaatacgaaaacctgtatgtaggttttgaacatctagtaattgattatcagttgacaatcgaatacccctctcttttttataagatgaagtgccctctaatgtaaaaaagtaggaattataagtcaaattccaaatgctttcttaacatcgtgtaatattttcttaataattatatagaatcactcactagattgcaagtctataaatttttaagatactgaattttcagaatacttacattccatttacattttttcaggatggtgcaaagaaaaggcactttttttcgagaaacgaatggttattaaacaaattctgataaagaaagagctgggtcatctatgactcagctcctgtatctgtcttaagcaagatggcttgaaatataatcaactgctccgccgactgtttcaatctgttcggcatcttcatcagaaatctccgtaccaaattcatcttctaattctaagacgaattccatcacactgattgaatcagcatttaagtcgtctttaatactcattgtatccgttactttatctgcatcgatctcaaaatggtttgcgatcactactgcaactttcttgaatacttcttctcgcgtcaattgccttcacctccacgcgttcgcacaaaacatagaatggctaacaaacattgtactgcttacatgcaaatttgtctagtccttttttgcattttcattacaatgattgcagtctcattgcgttggctcttcatgcttaggtgtttcttcaaaatgagccaccaattgaggaaccacatctgcctgcaacatggtatagatttgtttgatggttgctgccacggcatctggtccagtcgctccatgtgttttgatcactggtgctttcagaccaaacaagacagcccctccgtgtttggcataatccatctcattttttaaattgcgcaaggcatctttcaataataaagcccctaatttccctttggttccggaattcatgatggattgtttcaataacgacatcatattcaatgcggttccttcaatggatttcaagacggcgttcccagtgaatccatctgtgaccacaacatccgctgcaccgttcaaaagttccctagcttcaacatttccgataaagtgaatcgatgattctttggtcaacaattcaaacgcttttttggttaactcgctgcctttggtctcttccgtcccattgtttagcaaccctactcgcggttgttgaatgcctcggactttttgagcgtaaaaagaacctaacacagcatattgaacgagatgttctgctttattgtcagcattcgctcctagatccagcatatcaaagccagtttctttcccaagtacaggcatcgtcgacattaagccaggacgttcgattcctttgatacgacctacgataaacaaacctgcagctaacaaagcaccggtatttccagcagagaaaatggcatccgcttgaccttctttgaccgcttgggctgctaagaccatcgatgcgttctttttgcggcggatcgctttaacaggttcatcatcactgttgattttttcatcggtatgaatgattgtaagctgactttcgtctgtcacatattttctgatttcatcttcttttccgtataatagaaattcgatttctggatattctttttttgctaacatgacgccttcaacgatcgcttttggtgcgttatcgccacccatggcatctacggcaattttcatgacatacgccactcccttcatttttccaagttagtataccatattctttaatcaaaaaattgattgtctcgtttttctgctgctaaataatcggctagcgcttgatactccggtaaaatctgccattggtgcttctgccagatttgagttgcttctacttgtgcaacttcaagaatatgggcatcggctactaaatcggctgcggcgaattcaggtaaacctgattgacgattaccaaagacttccccgggacctcgcaattgcagatctttttcactgacgacaaagccattggtggtttcagtcatgattttcatccgctctattccggtttcatttttgggatttgccaccaaaatacagtaagaagcatctgcaccacggccgacacgcccccgcaactggtgcaactgagctaacccaaaacgatctgcatcaataatcaacatgactgtcgcattgggtacatttacccctacttcaataactgtcgttgataccaagatctgtaactggttgtccttgaactcttccatgatcgcgtctttttctatatttttcattttgccgtggagaatgcccacttggtagttaggggcaaaataagcctgcagctgctcgtaaatctccgtagcattcttgacatctaacatttctgattcttcaatcagcggacagatcacatacatttgatgtcctttcgctaattcctgacgagcccagtccagcacagattccaattgaggtggtcgtacccaacgcgtttcgaccggaatccggccagctggcatctcatcgatgatggaaacatccatctcaccataggccgtgatggccaaggttcgtggtatcggcgtcgccgtcatgaacaaaacatccggcaaatatcctttttctcgcaatatttttcgctgattgacaccaaagcgatgctgctcatctgtgatgactaaacctagacgggcaaaattgaccccttcttggatcaacgcatgcgtccctacgacaatatcgatctcacctgcagccaattgctccaagatcactcgccgttcctttgtcttggtggaccctgtcagcagtgccgttgtcacttctagcggatcaaataactggttaaggctttccaaatgttgttgtgccagaatctcagttggtaccattaacgccccttgaaagccagctgtcatagtggcgtacagtgcgatagcagccacaactgttttgccgctaccgacatctccttgcagcagtcgctgcatatgttgcggacttttgaggtcatgacagatctcgttggtgactcgcttttgagcagcagtcaattcgaaaggcagtgtctgggtgaaagcttttaaccgctgaacatcatagtcaatggctaagccgttcttttcagccttttcggaaattttcaatccttggatctgcatttgaaataggaagaactcttcaaagatgattcgccgctttgcttgatgactttcttgcggatcttttggaaagtgcatagctcgcatagcagtctggcgatccaataaccgatatttctccgttaaagttagaggtaagatttcctcgatctggtctccgtatgattcaaatgcctgcctgatcaagtcaaccagcacgctttgccgtaccgatttgtttacatgatagataggagcgaaatcacctggcttcttgctgccaagaatcttcatcccagctagtgatttccgtttcgcatcccatttcccgtaaaccgcgatttcttcagacaaaacaactttatcttttaaatagggctgattaaaaaaggaaacattgaatacatcatgatcttgcatcattcgaaactgcagccgactctttttgtaaccaaaacgatttacaacagccggggaaacaacgattcctttgatcgtgactttttcttgatcttgtatctcgttcaattgacgctcttgaatatcttcgtagcgaaaggggtaatatcgcaataaatcttcgattgtctggattccaagcgctgcgagatcttttgctcgcttttctccgacaccagacaaaacagtgattggctgatcaagcatttcttccctcctcaaaactagttgtttgcagattgttttctttattttactcttctctgtttaaattacgaagaatttgaatgaaaaaagatgagcaaaaacaggctgtttctctatcaatcaaaaaagagacggaaacaaaaatcgccctgcgacttttgccccgtctgctttcaagttttattcagccgagaaaagatacggataaacaggttgatctccttgatggatctccacttcgatctccggatagatttctgtcaatgctgcttcgatttttgctgcttcttttgcttttccttcttcgccgataataatcgtaacgatttctgtttcatctgaaatcatcttctgcaatgtatccatggaagcagagaaacaatcgggtacagaaaccacgattttcccatcaaccattcccaagaaatcaccttctgtgatttcaattccatcgatcgctgtattacgaatcgcgtgtgtcaccgaaccactgacaacacttgacaagatttcagtcatcgcttgttgattttccgctaacgttgcttgttcattgaaggccaacattgctgtcatcccttgtgaaatcgtacgggtctcaacaacagcgactgggatgtccgatacttctgctgcttgttgtgcagccataaagatattcttattgtttggtaagacgataacctgatctgcgttcacttcattgatagcagtcacgatgtcttccgtgcttggattcatcgtttgaccaccgctgatcacatagcttgcacctaagctggtaaatagtttatttaatccatcaccggctgcgatagcaatgattgcataaggtgtacgcggacgtttcactgcagcagagggttgatcgtgctccagaattgtttcatgctgtacacgcatattatccaccttgatcttgatcaaagaaccaaatttttggccatagttcatgacttcacctggatgttctgtgtgtacatggactttgataatctcatcgtcattgacgactaaaagagaatctccaagttcgtttagataatttcggaatgtttcataatcaaacgtactgtccactgttggtccttcaccaattttgaccatgatctctgtacaataaccgaatttgatgtcttctgtagccatttgtccttgaacgctgcgatgatgttcggcattgaccatttcatccattgctgctggtgttggttcatagacctcattggcttgatattctccagtcagtgcatttaagaacccttcataaatgaacaataatccttggccaccactatcgactacaccaacttctttcaagactggcaatagatctggtgttttggctagcgcacgttttgctccgtgaacgactgctttcatgacttctacacagtcatcactagtttgtgcttttttctcaccgtattctgcagcgatacgtgctactgtcagaatcgttccttctacgggtttcatgactgctttataggcggtttcgaccccatgtgtaaaggcttgtgccaattctggcgcagttaatgtttcgaccgtggggatcgctttagcaaatccacggaacaattgagacaaaatgacgcctgagtttcctcgtgcgcccattagtagtccttttgaaagagttgtggcaagatcgcccactttttctgaagtggcatctgctactgctttagcaccgcttgtcattgataaattcatattcgttcctgtatctccatcaggtactggaaatacattcaatgaattgacaaactctgcatttacttgtagacgagccgcgcctgcctgcaccatctcttgaaactgacctgcgctgatattcgttaccttcactgataatcctccttaaaatcatccgccgcaagcggatcacttgcctaatctggcagtacacgtacaccttggacaaaaacattcactgaatttgctgaaacgcctagcattgtttcaagattatatttcactttttcttgcacattgcgggaaacttcagaaatttttgtaccatagctaacgatcgtgtagacatccactgcaataccgttttcttcttgacgaacaacgacaccgcgagaatagttttctttgcgtaaaatttcattgatgttgtccttgatctgtttcttgctggccatgcccacaataccaaacacatctgttgctgcgccaccgacaactgtggcgatgacctcgttgctgatttcaataatacctgatgaggttttgatttttacagccataatatagcctccttaagcgggatattcccatctttcttctctcacattttatcatagctgctagtcaaataaaaggatgtgacttatgaaaaggggcttggcatcagatattcttgtattctgaccttgtttaatttacaatgtttactgctaaaagtcaatctttcttgaaaattacccttgcattttctaactttctatgataaattcagatggtatgagctgaaatagcgctccaacatcaaggcaaaggaggaaataaccacatggctaaagtttgttactttactggacgtaaaactacaagtggaaacaaccgttcacacgcaatgaatgcgacaaaacgtactgtgaaacctaacttgcaaaaagttcgcgttatgattgacggaaaacctaaaaaagtttgggtgtcaactcgtgctttgaaatctggaaaagttgagcgcgtataatcttaaccacacattttcggccgttcttgcgagcggtcttttttgttgtcttccgtttcattcctcctttcctttcttatgtcctttgttttttctttaaacagctaatgacattgtttttttaatcctttgaattatggtacactaataaaaaattcataaggattaggtgactattcttggctactatcaaatcattcatcaaacaacattggccttatatgaccgccagttttctgctgccgttactgattatggcagtcatttatttaacgatcggaatctatcccggcagcagccgcagtgtcttagcgagcgatgccttttcgcaattttcgaatttccatgccagttttcgtaatgtcttattaggcaagcagagtatcttctatacttggaatgcctctttagggttgaactatcttgcactgatctcttactatttaggtggtctttttacgccgctggttttattgtttcccaatcaattgatgccagatacgctctatgtgctgacacttttgaaaatcggcagcgccggactcgcattttggttttacgcgagtcaaacatttaaaatccaacggtggcatcatgttacgcttgctgtctgctatgcgttgatgtcctttatcactgctcactccgaattgatcatgtggctagatgcacttatttacctgccattagtgattctagggattgatcggctcttgcaacaaaaaaaaccgactcttctgtttgtcagttacctactgttatttatctcaagtttttatatgggattcatgatcggagtgttctccgtcttgtatctattcgtgcaattaggtcgcgattggaagcaaaacaagaaagcaatcatcccttacggcatcacttctttattagccggtggggcttccatgatcatcattttgcctgctgtacttgatttacgttcaaatggggaagaattgtccactatcacgaagttcaagacagaagctactggtgttttcgatcttgtaatgaaaaatatgattggcgtatatgatacaactaaatacggttcgatcccgtttatttatattggcctactgccattactactttgtattttatactttgtttctaagagaattcctttaaaagataaactgctatatgctggattgtttagcattttgatcgccagtttctatatcgttcccttgaatctcttctggcatgggatgcatgccccaaacatgttcttgttccgctatgcctatttgttctcctttctagtgattcttttggctggttatggttgggaacagctgcagcaaaaagaccgaggtctgtttgtgattgtcggactatctacgattgctctctttgcactttcttatggactgggaggaaactcgtatgaattcgtcaccacagcctcttttgcgttaacgattgttttctttgccctttacttgctgtgtatcggtttcggtcaacttggtatgctaactaaaaagaaagtggcacttctcttgttggttttcgtttgcggtgaaatggcgatcaacacgagtgggatggttcgcggaatcttaaatgattggaattacgcctctcgaagtctgttcactgatccttatccttcaatcaagcaattggtggatcaagccgataaagacaatgagacctttttccgtttggaaaatctggatcccgtttcttccaatgacagtatcaactatggttacagcggtgtcagcatgttttcttcaatccgcaaccgcaactcctctagttacttagataaattaggttttcgttcaagaggaacgaatcttaatatccgttatccgaataatacattgctaatggatgctttcaccggcatcaaatacaatattagcaaacaaaacttaacaaaatacggttttgaacgcgtaggagaagctggagactacaagctttatcaaaatagcaacgctcttccccttgccatgttagcagagccttcgatcaataagatccaacagcctgccaacgacaatctaaccagccagaagaatttgatcaacggtttggcaaacattgaacaaaactattttgattttcaaccgatcactgtcattcacagcaaaaacaccgatatcactgaaaatggcatgtacacgacattccaagagcaagaaagcaatgtggcgaaagagattacttggcaagtagaagtacctgctcattcccaagcctatcttagtctgtatccggcaaacttcggtgaattagagagttctacagctacgatcactgtgaacggggaacagcgggaaagtcaaattggaatcaatggtcaatattatgatctaggctactatgatacggcaacgaccgtgcagtttacggcaagtttctatggcactcagtcaatttctttccaaaacccacaggtggtgacattagacactaccgcctttcaacgggcaatcgatgccattcaagagagaggtgttgcgatgactgtcggcaaacaaaatgccgaagccgatatcactactgagaaagaacagcagcttatcactacgattccttatgacaagggctggtctgccaaactggatggcaaacctatcgctattgacgctttccaagatgcgtttatcagtgtgaagatcccaagcggtacccaccatcttgaactgacttatttaccgcaaggttttgtgatcggagtcattttattctttagctgcctactgctctttattttgttccgctatttctatcaaagaaaagtagcagctgagatagaacacacacccacagacaagccaggcagatgagagcaatcgataccttctttatctgccacaatagcagtcagctgcgaaaagaagcgccccccaacggatcgatacgaatcgaaccttaggaggcgcttctttcttttagttctcttttattcataggctacgcgaaccaaatacaacccttccggatgagcagtaggtccagcggcattgcggtctttttgggcaataatggcgggaatgctatctgctggtaagcgtccattaccgatcttcaacagggttccgaccatgatgcggatcattttatataagaagccatcgcctcgaaaggtaaagagtagttcgtctccggcctcattcacttccatactagcttggtgaatcgtccggactttatcttctacggagctgccagtggcacaaaaactggtaaaatcatgcgtacctaataaatcgggtaaagcttgctggattttcattaggtccaacggatacgggtaatagcttgcgtaatatctacgaaaagggcttcgtggtttgccgatatctacgcgaaattgataggtcttctcccgcacaagatagcgggcgtgaaagtgttcatcgacgatttccacctgtttcacagcaatatcttccggtgtttgtgtatcaagtccaaagcgcattttttctaatggacgttcgtcaaagtcaaaatgaatcacttgacctaaagcatggacacccgcatcggtccgtcctgaaccgtggatttggactgcttgtccattgttcatgcgagtcaatgttttttcgatttcttcttgtactgtgcgtccattgggttggcgctgaaatccttggaaattggtgccatcgtaagcaatcgttgctttataacgtaccatcttctcacctgctttcattttctcaaaaaaatctgaggagccgattgcactccccagacatttacttttatcctcttaataatactaaacctactgtaaagagcacaaagaccaacactacgagtgtgtcgcggttgtgccagtgaagaatccgatacttggtccgcccttcaccgccttgatagcctctagcctccatggctgtagctaggtcctctgcccggttaaaactgctgacaaacaaagggatcagcaatgggacgatagctttcatcttttgcaacaacccgccttctccgaaatcgactccgcgggcacgctgggcattcataattttctcagtctcatccattaatgtcggcacaaagcgaagtgcgatcgacagcatcaaagaaatttcatgcacgggaaatcggatggcttttaatgggcgtaatatatattcgattgcatctgacaactccaaaggtggtgtcgtcaacgtcagcaatgtcgacataaaaataatcaaaacaaaacggcaaaaaatgaacgcaccattctgcaaaccaaattcggtaatattgaagatccaccaggaccaatagacttctccacccgtcgtaaagagaatctgcaatgctacagtgaataaaatcagccagatcaacgggcgaacaccacgaacgaaaaaacccaaatcaattttggaaagaaaaatgctaaatagcgtaaaaacagctgccaaaagatagctctgccaattgtttgccaaaaaaatgattccaataaaataaaaactggcaagtaatttcacccgtggatcgagtttatggataaaggaatctcctggaataaagcggccaaagattagtttattcatcatttgcggtcgcctcctttgctaccagttgatccgcaagttcttctgctgtcaatggcaagtgttcgaaatgcaaccctttcgcttgcaacaacgctgcaaaagcagttgctgttggtacgcctaattgtttttcttgtagccattcgatatcttgaaaaacattcttcggtgcaccctctttaacgattcgtcctttttctaatacatagacataatctgcaaaattagccacatcatccatcaaatgggtcactaagatgatggtcatatttttctcttgatggagtcgctggaacatctccatcatttctttgcgtccttgtggatctaaacccgctgttggctcatctaataccaatacttccggttccattgctaagaccccggcaatggctactcggcgcatctgtcctcctgagagatcaaatggggaacgttcaagaaagctttcatctaaaccaacgagtttaatgtactctttcgctaattcagctgccgcttcttcactcacaccaaaattttggggaccaaaagcgatatctcgagccacagtttcttcaaacaattgcgattcaggaaattgaaagacgattcctacttttttacgcaatggttttaaattcttattatcagtttcaggagtgatcacgcgatcaccaatcgtcactttgcccgctgttggctttaataatgcattcaagtgttgtagtaatgttgatttgccactaccagtgtgacccaccaatgctgtatacgagccttctttgatttcgagatcaatatcgaataacacgcgttgctcaaatggggaatgcggttgataagtaaatgctactttttcaaaacggatgtccatagccaatccaccattccttcctctgtcaagtacgctgcaggcacagagatgccgcgctgcttcaaagctgccttcaatttttctggaaaaggcaaatctagacccaattcgatcaattctgggccagccgaaaagatttctgccggcgtcccttcacgaaccagttctccttggcgcatgaccatgacccgattggcattggctgcctcatcaatatcatgggtgattgacagaacagttaaattattttcttccttgattttcttgatcgttgaaataacttcttctcttccttcaggatcaagcatactagttgcctcatctaaaatgatgatatcgggacgtaatgccacaacaccagcgatggctactcgctgtttttgtcccccagaaagtctggctggttctcgtgttgcaaattcttccatccggacttgttctagagcatttttgactctgatcaccatttcgtcacgaggaatcccttggttctctagaccaaatgccacatcatcttctacagttgaaccgacaaattgattgtcgggattttgaaaaaccattccgaccattttacggatattccaaatattttcttcattaagcagcatgtctcccactgcaacgcttccttcttgcagtaaaatcaaaccgttgatcgttttggccaaggtcgattttcctgaaccgttatgaccgataagcgcaacccattctccttgctcaatggacaaagagacattcttcaacgccggacgatcttcttcggtataacgaacggtgatagcattcaattcaatgatcggcttcatgatatactccttcattccagttaattcttacttacactaccaaaaaagtaagttattttcaatcattccgatgagatttccaaacagaactttgttttcacttgccatgacctgtcaagacagatcatcgaaagtaaaaaaaaagcactttatgatgagtgcgtacacctcgaaatacatcgaggtgtaggcgctgagctagactcggaaagtttcttccaacatcataacactcttaataaacatctataaagtgatgataagtgtgattttaaacaagttctaggataaccattggtgcagcatctccgcgtcttggttctgttttcaagatgcgagtgtagccaccttggcgatctgtgtaacgaggagcgatgtcattgaataatttttgcaaagctgattcaataactacttcttcgttttcttcacgaacgctagcaacttcattacgaacaaatgcggcagcttggcgacgtgcatgcaaatcaccacgtttacctaaagtgatcattttttctgcagttgaacgaacttctttcgcacgagcttcagtcgtaacgatgcgttcgttaatgaataaatcagttgttaaatcacgcaacatcgctttacgttggctagatgtgcgtcctagtttacgataactcacgtggtttccctccttcactttcgtatgtcgtctcgatcagacgagccgaaactaacgtaatcgaagacgtattaatcgtctttacgtagtcctaaaccaagatcgtgtaatttcactttgacctcttcaagagatttacggcctaagttccgtactttaatcatttctggttcagatttattagtcaattcttgtacagtattgattcctgcacgttttagacagttgtatgaacgaacagacaagtctaattcttcaatcgtcatttccaacattttttctttttgtgtttcttctttttccaccatgatctcagcgtttttcgcttcgtccgttaggtttacaaagatgtctaaatgttcggtcatgatttttgcagctaaactcattgcttccaatggttcaattgagccatcagtccatatttccatcgttaatttgtcaaaatcatcacgacgaccaacacgagtattttctacttggtagttcacacgacgtactggtgtatagattgaatcgactggaagaacaccgattggcatgtcttcttttttattttcatctgcttgaacgtagccgcgtccaggtttcacagttaagcgagcatggaatgaagctccttcagaaacgttgcagatatacatatctttgttaaggatttctacatcactgtctacgatgatatcgccagcagttactgtagcaggtcctgtaatatcgatttccagggttttttcttcatccccgtacatttttaatgcaagacctttgatattcaagatgatttgagcaacgtcttcccgaacgcccttaacagttgagaattcgtgtaaaactccatcgatttgaatattggtgattgctgcaccaggtaaagaagataataaaatacgacgtaaggaatttcctaaagtagttccgtatcctctttcaagaggctcaacgatgaacttgccataatctttttcttcatcaatctttgcgattcttggtttttcgaattcaatcattcttatcttttacccctttcaaaacgaaaagtgtcttgttcaatgacgtaattgttacactcaaaatgagcagcactcattaaacacgacggcgttttggagggcggcatccattatgagggactggagtcacgtcacggattgcagtcacttccaaacctgctgcttgtaatgaacgaattgctgcttcacgtccagaaccaggtcctttaactgttacttctacagttcttaatccgtgttccattgctgctttggtagctgtttctgctgccatttgagcggcaaaaggagtagattttttgcttcctttgaaacctaatgaaccagctgatgaccatgctaatgcattcccatgagtatcagtgatcataatgattgtattattgaatgttgagtgaatatgtgcaatacccgcttcaatattctttttcacacggcgtttacgactcactttttttgctgccatgaagttttaacctccttcacttaggaattattttttcttgcctgcgactgttttagacgggcctttacgagtacgtgcattgtttttcgtgttttgtccacgaactggcaatccacggcgatgacggataccacggtatgaaccgatttccatcaaacgtttgatgttcaagttcacttcacgacgaaggtcaccttcaacttttaatttatcaacttcagcacggatagcatctgtttgttcattcgttagatcacgaacacgaacttcttcagaaacgccagcgtttgctaaaatttgttttgcagtcgtgttaccaataccatagatataagtaagtgaaacgaccacacgtttatcacgaggaatatctactcctgcaatacgagccatatttgttacacctccgattatccttgacgttgtttatgttttggatttgctgggcaaatcaccataacgcgtcctttacgacgaattactttacaatgttcgcacattggttttactgatggtcttactttcatgataatacctcctgtggttttacggagtacaattatttaaagcgataagtaatgcggccacggttcaggtcatacggtgataattcaaccgtcactttgtctccaggtaatatacgaatgtagtgcatccggatcttaccagaaacggtcgctagaacttggtgtccgttttccaattcgactttaaacattgcattcggcaaagtttcgacgactgtaccttcgacttcaatcatatcttcttttgccacgcacagtacctccttgtacttgtgattttcacacgataaaatggcggaaacggggttcccacctgatattctcaaactatgcttctacttaataacagtagaagtcggactgacatattttatcatactctgtcaaaggtttcaagagaaagttttgtagctgcaagtcggtgacgggcaatctatgattagtcaatgatgtttttaacatctttaaatacagcatcgatgtcgcgatcaccatcaatcgactgcaataaacctttttctttgtaataagctaagattggttcactgcttttgatattgacagctagacgatttttgaccgtctcaggcttatcatcttcacgttggtagaagtcatgacttccacaacgatcacatgttccttccacttttggcggattgaacaatttatgataagttgccccacaattgcggcacatgaagcggccggctaaacgttctacgagaacttcttcaggaacatgaatatcaatgacagcatctagttttttgtttaggtctttcaacatttcgtccaatgcttcagcttgttccaaagtccgcggaaagccatccaataagaagcctttctctgtgtctggttcagctaaacgctctttgacgataccgttggtgacctcatctggaaccaaagcgccttgatccatgtaagattttgctttcaggcctaattctgtttcgttcgccattgcagcccgaaacatatcgcctgttgaaatatgaggaagaccgtattcagcaacgatacgttctgcctgagtacctttaccggcaccaggtagtcccattaaaatgaggttcattctaattcctcctgtaagtttttgaatagtgttgaggaggacctcaacacttcaataactttaattgataaaaccagtatatttccgtttcagcataagtccttctagctgcttcgcagtatccagagctaccccgataacgatcaataaacttgttccacctaaaccgattgattgcggcaagttccaaaccatctgagcgatgatcggcaacagcgcaactagtcctaagaagaccgatcctactgtacttaatcgcataagcagacgtgagacgtattcttctgttcctttaccagggcgcacacttggaatgtagcttccttgtttttgtaggttttccgctaatttctcagggttaacttgtacaaatgcatagaagaacgtaaacgccacgatcaaaacagtatagatgatcgcaccaggtacggtgttataactaaaaatcgtttgtactacttcataccaagtttcgcctttgtacgaactacctaatgcttgaatgatcgcatttggtgttgtaataaacgaactagcaaagataactgggattacaccggcagcgttgaccttcaatggaagataactacttgttggcgcaccagctactcgcttcgtatattggattggaatctttcgttctgcttgttgtacatacgtcacaaatgtgatgatgaccaaaacagcaacgacaagcaagaccataaacaatgcattcatccaaatatctgatggatccacgttgatgaaataatcttctaccaattccttgatactagcgggtaagcgtgaaatgatccctgcaaagataatcattgacacaccatttccaattccgcgttctgtgatttgttctcctaaccaagtaacgagcatcgtacctgctgttaagatcaaaccaatcaccacaaacgtcgagatatttggattgttgacaaagccaagttgtgtataatagttgaaccctgcagttaacgtcatcgactgaacaaaggccaaaaccaatgttaggtaacgagttgcttgattcaatttcttacgaccaacttccccttgcttcgaccactcaacaaatcttggcacaatatccatctgcaacaactgaataacgattgacgcagtaatatatggtgacacacccattgagaaaatcgagaattgctgcatcgcgccaccgctgaccaagttcaacatgttcagaaacggtagatcagcaatttcccgcaaacggcttgcgtctacgcctggcacagtaatatgtgtacccagacgaaagacaaacaagataagtacggtgaagaaaattctcgatctaatatcttttactttaaaggcgtcctttagtagtttgaacattagatcacctcgattgatccaccagcagcaacgattgcttcttcagctgcttttgagaattttgctgctttcacagtcaatttcttcgttagttctccatttgctaatactttgattccagctttttcatctttgacgattccagcttcatgcaaagcaacaggtgttacttctgcaccgtcttcaaagcggtttaatacatcaagattgataactgcatattctttgcggttgacatttgtaaatccgcgttttggcaaacgacggaacaatggtgtttgtcccccttcaaagcctaaacgtactccgccacctgaacgagctttttgacctttttgtccgcgtccagctgttttaccgttaccagatgaagttccgcgaccaacacggttacgtacttggcgtgatccttctgatggttttaattcatgaagtttcataggtttggcacctccttaatcaaactagatctgctgatccttagacttcttcaacgtccactaagtgagaaacagtgttgaccatgcctttgattgcatcattagcaggttttactactgttgaattcaactttgtaagacctaacgcttttacagtatcgcgttggttttggggacgtccaataatactgcgttttaaagtgattttcaattcagccattatagtgtcctccttaaccgattaattcttctactgatttgccgcgaagtgctgccacttcttcagcgcgtttcaattgtttcaacccttcaactgttgcgcgaacaacgttgattggtgtgttagaacctaaagatttagatgtgatatccgctaccccagctaattccaatacggcacgaacgggtccaccagcagctaccccagaaccttctacagcaggtttcataaggatgcgtccgccgccgaatacaccgataacttcgtgagggattgtagaaccaaccattggtacttctaccaagtttttcttcgcgtcttcgattgctttacggattgcttctggtacttcttgtgctttaccagtaccgaaacctacgtgtccgtttttatcaccgacaacaactaatgcagcaaaacgtagacgacgtccacctttaacaactttagttacacggttaatcgcaacaacgcggtcttctaattccaaatgttttggatcaatataaaccatgaatggtgttcctccttctcttaaaattccagtccattttcgcgagctgcttcagctaaagctgctacacggccatggtaaaggtatccaccacggtcaaagactactactttaataccttttgctgctgcacgttctgcaactaatttgccgacagcttgtgcttgttcagttttgtttccacctgaaatttctttatctaaggcagaggcacttgctagcgtcacacccgctacgtcatcaatgatttgagcgtagatgtttttgttcgaacggaacacgtttaagcgtgggcactcagcagtaccagagattttgttacgtacacgacgatgtcttttctgacgtgttttatttttatctggttttgtaatcacaattgtcacctctttttatttgctagcctaagccgctattcgtaaatgcttacgactatttaccagttttaccttctttacgacgcacaaattcgccaacataacgaattcctttgcctttataaggttctggaggacgaacgccacgaatattggcagctaattcgccaacaacttctttatctgatcctttgatgatcacagaagtgtttgaaggaacttcaatttcgattccagctggcgcttcgatttcaaccggatgagagtaaccaacgttcaatacaagttttttaccttgcaattgagcacggtacccaaccccgatcaattctaacgctttttggaaaccttcagaaacaccaacaaccatgttgttgaagtttgcacgggtagttccgtggatagttttcatttctttactatcgtttggacgagtgaatgttacttcgtttccttcgatattcattttgatatcagaagaaaaagtacgtttcaattcacctttaggtcctttaactgtaatgtcgtttccatcttgtttgatttcaacacctgcaggaagaacgacgatcttattaccgatacgactcacttagaggcacctccttgtggattattttaaattaccatacataagcgactacttcgccgccaacattttttgctcttgcttctttgtcagtgataacaccttcagaagttgagatgatcgcgattcctaaaccgttcaatacttttggcacttcgtcagctttgacataagcacgcaaacctggtttagagatacgtttcaagtttgtgataacacgttcaccgtttttgccgtatttcaagaatacgcggatcacgccttgtttgtcatcttcgatatattcaacatcgcgaacgaaaccttcacgtttcaagatttcagcgatatcacgtttgatttttgaagcaggtacttctaagctttcgtgttttaccatattggcattacgtacacgcgttagaaaatctgcgattggatctgtcatgaccatgggataatttacctcctttatgcgagtatagtttaccagctagctttcttcacgccgggaatttgtcctttataggcaagttcgcggaagcaaatacggcaaagatgaaatttacgataaactgaatgtggacgtccgcaacgttcgcaacgagtatactcttgtgttgagaatttagcagggcgtttgtttttagcaatcattgattttttagccacgtagttcgcctcctttttttatttttggaatggcatgcctaattgtgacaacaattcacgagattcttcatctgtgttggctgttgttacaataacgatatccataccacgtactttatcgatcaaatcataatctacttcagggaagatcaattgttctttgattcctaatgtgtagtttccgcgtccgtcaaacgcttttttgctgacaccgtggaagtcacggacacgtggcaatgaaactgttactaacttgtctaagaattcatacattctttcgccgcgtagagtaactttcgcaccgattggcattccttcacgtaaacggaatccagcaatagattttttcgcttttgtgatcaatggtttttgacctgagatcaattgtaattcttcaacagctttatctaagttttttgcattcgatacagcatcaccaacacccatgttgataacgattttatcaacttttggtgcttgcataactgagctgtagttaaatttgtccattaatgatgggacaacttcttttgagtatttttctttaaggcggttcatctgttagcccctccttcctttatttgattatttatcaagaacttctccggtttttttagaaacgcggacttttttgccgtcaacttctttatagcctacacgtgttgcttcaccgttcgaaggatcaaccaccatcacgttagaaacatgaattggtgcttccatctcgacgattccgccttgaggagctgtttgagaaggtttttggtgttttttaacgacgttcacaccttcaacaacgactttgtctttcttaggaaacgctgcaagtacaacgccttctttgtttttgtctttaccagtgataactttaactttatcgccttttttaacaaacatgtttgtttcgcacctcctttagataagaatcactattacaatacttctggtgctagggaaacgatcttcataaagttgccttcacgcaattcgcgagcaactggtccaaagatacgagttccacgtgggctcttatcgtcacggataataaccgcagcattttcatcaaatttaatgtaagaaccgtctgtacgacgtgctcctgattttgtacgaacgataacggctttaacgacgtcaccttttttgacaaccccacctggcgttgcttgtttgaccgtagcaacgatcacgtcaccaatattcgcagttttacgaccagatccgccaaggactttgatcgttagaatttcacgggcacctgagttgtccgccactcttaatcggctttctgcttggatcacgatgtgtatcctcctttcagattttgcaattcacaatctatataggaaaatctcgtgtgattagataatcactgccttttcaacaatctctactagacggaaacgtttcgtagctgataatggacgagtttccataattttcacgatatcgccaacttttgcttcgttgttttcatcgtgtgctttgtatttcttagaatagttcagacgtttgccgtagatagggtggtttttcttagtttcaacgacaacagtgattgttttatccatcttgtcggataccacgcgaccttggtaaactttgcgttgatttctttcttcagtcatacgctaaatggcctccttccactattactttgcttgttcacgcaatactgttttgatgcgtgcaatcgatttacgtacttctttgatacgtgcagtgttttctaattgtcctgtagctaattggaatctaagattaaacaattcttctttcaattgtttttcttgatctagcatttcggcagtggttaattctctgatttctttaaccttcattcgattcaccacccatttcctcacgttttacgatctttgttttcactggcaatttgtgagaagcaagacgtaacgcttcacgcgcaacttcttcgggaacgccggcaatttcaaacatgattttaccacgttttactggtgatacccatccttcaggagcccctttaccagaacccatacgtaccccaattgctttggccgtataagatttgtgagggaaaattttgatccatactttcccgccacgtttcatataacgagtcattgcaatacgggcagcttcgatttggcggtttgtgatccagtgtgattcaacagcttgcaagccgtattcaccgaaaactacttcttttccgcctttcgcttcaccgcgcattttcccgcggaattcacgacggtgttttacacgtttaggtactaacatgtttatttccctcctttctcagtgttctttttagttggaagaatttctccacgataaatccacactttaactcctagttttccgtatgttgtatctgcttcttcccatgcgtaatcaatatccgcacgtaatgtatgaagtggaactgttccttctgaatagccttctgaacgagcgatatctgctccgtttagacgaccagatacttgtgttttgattcctttagcgccagaacgcattgtgcgttggatcgcttgtttttgcgcacgacggaaagcaacacggttttctaattgacgtgcgattccttcgcctactaatttagcatctaaatctggttttttgatttcaacgatgttgatgtgaactcgtttgccagttaatttgtttaattcttttcttaggttttcgacttcagatccgcctttaccgataaccatacctggtttagctgtgtggattgaaatatttacgcggtttgctgcgcgctcgatttcaattgttgacacagcggcatcagcaagtttagatgcgataaatttacggattttcaaatcttcatgtagaaattcagcatactctttttcagcataccattttgcatcccagtcacggatgatgcctacacgcattccaattggatgtactttttgacccactgattgtccctccttatttttctgatacgactacagtaatatgacttgtacgtttgttgattggagaagctgaacctttcgcacgtggacggaaacgtttcattgttggtccttcgttgacgaatgcttcagaaacaatcaagttttcaacatctaagtcaaaattgttttctgcattagcgatagctgacatcaagactttctcgatgattccagccgctttgtttggtgtgaacttcaagatcgcgattgcttcagcaacgcttttccctctgatcaaatcaataactagacgtgatttacgaggagaaacgcggactgttttagcagttgctttcgctgatgtgatttgttctgccatttttggatatcctcccctcaaaattagcgtcttgttttcttatcgtcggcagcgtgtccgcgataagttcttgttggtgcaaattcacctagtttgtgtcctaccatgtcttcttggatgtaaactggtacatgtttccgtccatcatacacagcaattgtaaatccgataaaacttgggaagattgtggaacgacgtgaccaagttttgatcacttttttcttttcagcgccttgttgtgcttcgaccttcttcatcaaatggtcatcgacaaaaggtccttttttcaaactacgacccatggtgtacctcctctcaaaatgtgcgacacatggtcaagtaaattatttagtcttgcgacgacgaacgataagtttgtctgatttagctttcttgttacgtgttttgtaaccaagtgctggttgtccccaaggtgaaactggagctttacgtccgattggagctttaccttcaccaccaccgtgtgggtgatcattagggttcattacgctaccacgtacagttgggcgtttgcgcatccaacgagaacgtccggctttaccgatgttgatcaattcatgttgttcgttaccaacagagccaattgttgcacggcatgttgccaagatcatacgtacttcgcctgagttcaagcggatcaatacatattttccttctttaccaagtacttgtgcacttgtaccagctgaacggatcaattgtccgccttttcctggtttcatttcgatgttgtggataacagtaccaactggaatattttctagtggtaatgcgttccctactttaatatctgcatctggtccagaaacgacagtcatgccaacttctaatcctttaggtgctaagatatatgcttttactccatcctcgtaatgtactaacgcaatgttagcagaacggtttggatcatattcaatcgttttaacagtagcaacgacattgtctttgttacgtttgaaatcgatcaaacggtattgacgtttgtgaccgccaccttgatgacgaaccgtgatacgtccgttgttgttacgaccagcattgtttttcaatggcgctaacaatgttttttctggtgttgaagttgtgatttcagcgaaatcagaacttgtcatattacgacggccgtttgtggtaggtttgtactttttaatcgccacgtctttttccctcccatttagtatttaaatatggtctgcttattcagcagcgtcaaaaatttggatttcttttgaatcttcagttaaagtcacaacagctttgcgacgtttttttgtgtatcctgcatatttacccatgcgtttgaatttagggcgtacgttgatgatattcacgttagccactttcactccgtcaaaggcagcttctacagcttgttttactaaagttttgttcgcttttgtgtctacttcgaaagtatatttcttgtcatccatggcaagcatagatttctcagtgatcactgggcgtttgatgacgtctagtaagttcattatgcaagcacctcctcgatctgagtaagagcagtttgtgttaccaacattttatctgctgaaacaacatccaatacgctcacgttatcagcagttactactgaaacagatggcaagttgcgtgcagataatgcagcaaagtcgttttctgtttctaaaactaccaatacttttgagtcaatagtcaagttagctaaaacttgtttgaattcttttgtttttggtgcatcaaagcttaacccttctactgctaccaagttatttgaagcaactttttctgacaatacagatttcattgctaagcgacgaacttttttaggaagtttgtagctgtatgaacgtggtgttggtccgaagactacgccacctccacgccattgtggtgaacggattgaaccttgacgagcacgaccagttcctttttggcgccatggtttacggccaccgccacgaacggcactgcgatttttcacagcgtgtgttccttgtcttaatgaagcacgttgcatgatgattgcatcgtagacaactgtttcatttggttcaattccgaagatttcttcgttcaatgtaatttcgccattttggcttccatcttgtttgaataatgctacattcggcattccttagttcctcctttcttcctatctacttatttagctttcacagctgatttgattgtaatcaatgattttttcgcgccaggtacattacctttaatcaagataacgttacgttctgcgtctacacgcacgatttccaagttttggatcgtgatgcggttaccgcccatacgtccagcaagacgtttgtttttgaatacacggttaggtgcaactggacccattgatccaggacgacggtgataacgagaaccgtgagccattggtccgcggctttgtccgtgacgtttgataacgccttggaatcctttacctttcgaagtgccggttacatcaatgatgtctcctgcttcaaaaatatcaactttaatttctgaacctacttctaagccctctagctctacattcttgaattcgcgaatgaagcgcttaggagccgtgtttgcttttgcaacatgacctttcgcaggtttgttagacaaaacttcacgcatatcttggtagccgacttgaattgcttcgtagccgtcattttcgattgttttcacttgtagcactacgtttggagtagcttctactacagttactggaatcaattcgccagattcagtgaagatttgagtcattcccacttttttccctaagattcctttggtcatgattacacctccatcttaattattatagtttgatttcaatatttacaccgcttggcaagtctagcttcattaaagcatcaactgtttttggtgttggattcacaatgtcgattagacgtttgtgtgtacgcatttcgaattgttcgcgtgaatctttgtatttgtgtgtcgcacggatgatcgtgtacaagctgcgttcagttggcaatggaattggaccagatacgccagctccagttctttttgcagtttctacgattttatccgctgattgatctaaaatacgatgttcatacgcttttaaacggatacgaattttttgttttgccattgttttccctccttcgcctattttgaaaagtagacatagctccacgaaaatttccgtcacgctcgtccatggcaaagcgtccgggcgtgtcgcaacctctcgtttcgtagccggcagttttttctttgctgccagtgtgacttacgcatatacgtaaacagcacctttatgattatattatggataaacgctgattgcaagctttttttaatgaaaagaaacgattcttttgcgtttttttcagaaaactttcttttctcttgaaaacaacaaaaaccttgcctaatgacttgctctaagcaaaagcttttccaacaaccatagctactaacgcaaaagcgccccttccggaataattctccagaaaaagcgcttcaaaccactaatcatctcgatttactactagttgattaatcctttagtcacacgttggattgctgcttttaacggaaaataagcaatagcgacaatcaaaatcgtggccactacattgatgactgttgccggcaatttgatgaccgctgccgaccaagctcctgaccagctgctgccaagataccaaagcataacagtatttttgatttgcgtcatagcaagtttcgccaagccagtaacagacccaataaccactaactgccatattgcttgcggacgttttttaaataagagaaacgcaccatatgcaaaagcccccacaataaaactttccaaaataaaataaggggcctctgtcgcatacccattcagcaaatcaaaaatcgcaaagcctagtcccccagcaagggagcctttcacataacctaataataaaactgctaataaaagaacggcattccccaagtgcacaaaggcgccggtgggcaatgggatcttgatcatcgtaccaatgactgtcaacgctgtaaacaatgccacaaagacaatacttcgaattctgtgatcattcatgtggtatcatcctttcttccgcatgattataagcaccgtgccagacgtgaccgacataaggattgatcagaaccccttgtcgaatcgccgcaacgacgaagtctttggccaagcgaatgctttctagtaacggcagcccttttgctaatccagcagtaatggctgcagaaaacgtacagcctgcaccatggttgaaatcagtatcgatcctccggctttctagagtagtaaaagagtgtccatcataaactaagtcaattgcctgcgctcctggcaaccgatgacctcctttgacgacgacacacttcgcgcctaaatgataaatccttttcgcagcttctttcatagcaacaaggtcttttaagtcccccatccccgataaaattccagcttcaatcaagttaggtgtcaccacatccgccaaaggcagcaagtattcgatcaatgcatccacactctttggctgcaaaatatgtgcggtccctttacaagcaataacaggatcgatcaccacctgtttcacttgttgttgctggatcatcttggcagcctgcgcaatattggcttcattccccaacatccctgtcttaacggcatccattggttcccccgtgaaagccgaaatcaattgtttttcgatcaaagaagtgtccatagctgtcacttcgtgggtccatcccattgacggatccatggtgacgatcgaggcaatcgaagcaaaaccaaaaacaccatactcttgaaaggtctttaaatcagcttcaattcctgcgccgcctgttgaatcggacccggcgatcgttaatactttcttcattattatcgactccttttattcagtataaccaatggtccccttgacgaaaacagccaattggcttatttttataccatccaataaaaaaggagggctctaatgaccgattggcaaatcgataaacagaagaagcaaccactctatcagcaaatcgtcacttactttatcgaggccatccaaaatggcgattacacacctggtgaacagttgcccgccgaacgaaaactagccactcaattcggggtcaaccgttcaacgatcgtcaaggcactggatgagcttcggagtttaggatggatcacgcgcaaacgaggcagcggcacacaagtctctgaaggtcgatggggcaaccgtcagacccctctgtcttatctccgctcgtctctatctagtccctacttacagcaagacccctttgttgaagagattcagcgattgcgcacaaaagaccaaattctcgacctttatacaggtgatctgccacaagaactgcttcctgatttccaatttcctgcctttacttgggagatgatccgcaacgaaagcctgcaaagcaccccagccggctatccaccattgcaagaagtcttgatgcggcacttgacggaagatttcggaatccccttatctggacaaaaactcgtgatcacttctggctccacgcaaggtatcacactgcttatgcaagttttgttgacttcaggtgatagtattcttacggaagatccttcctttttgttttcattgcccttatttacaacaatgaatgtccgcgttctcggaatcaaacaggacgaagaagggatgcgaccgaaagacttagaacaagcattgaaagagcagaaaatcaaatttgtttatttaaatccgacattccaaaatcccaccggtcgtaccatgagccttggccgccgcaaagaaattatcgctatttgccagaggtatcaagtaccgatcatagaagatgatatctttagtgagttagcctttacgccgcaacccgaaaaatttaaggcactagcaccagattcggtcatttatctcggatctttatcaaaactctttgggtcttctatcaaaatcggctggttattagctcctgaagcattggcggatcaatttgctcaagctaaaaaaaggatgtctatcgagacaacgatttttcctcaactgttagctaatcttgctctccgttccatggagtaccctcaacaacaacaggacttgctaaaaaagatggctcaaaagcaacatgccttgattcagcgactggacgctttttctgaggattgggcattccaacagaccactgggggactatacctctggctgcaatggcaacacgccccactgaaacggagagactggacacttttcttaaaaaatgattgtctagttgccccagcctttctcttcagcaatgatacaaacggatttcgtctgaactatacacgactttcggaaaatcaactagacttgttttgtcagcaattcagaaaaatcacaacacaattaaaggagcatctgtatgaatgagacaattgatctattaaccaaccaccgcacttatcgccaattcgatagcaactatcaattatcaaaggagcagttagaagcaattttatctgctgcacgacaagcacctagctggatgaacgggcaagcttattccattctcgtgatcgatgatcgttcacttcgacaacagctggttacttggaatccaggtaatcctcatatcgctgaaagttctatctttttacttttcttggctgatttaaaccgcaccaagaaagttgctgagaaaaaacaaacaccttatctggttgatgaaggtctacaaccattgttgatcgcaacaaccgatgctagtatcgctttacagtcagctgccattgctgcggaatctcttggtctaggaacagttatttccggcagtgtccgcaaagacagcaaagcgatcgccgaattgctcgaactgccagaatacgtttaccctgtggctggattaagtattggcaaaccaattgtagatatggctctcaagcctcgcttgcctcaagaggcggtaatccattacaacaaataccaggattattcctatcaagcgatcgaagactatgaccaaatcatgaccgccttcggtgaagcgagagaaacaatgccttggtccgaaaaattcgccaatttctacggccgtgtccctgaccaaggctttgatcagtttctaaaagatcaaaaattgatcaaataaaaattttcaagcaaaaaaagcagaagcgctagcgcttctgctttttgcatttatcaagtcaattaagctttgatttcagttacaacgcctgaaccaacagtacgtccgccttcacgaattgagaaacgagttccgtcttcgatagcgattgggtggatcaattcaacgtcgattgttacgttatcgccaggcataaccatttcagttccttctggtaattcaacaacaccagttacgtcagttgtacggaagtagaactgaggacggtagttagtgaagaatggagtgtgacgtccaccttcttcttttgtcaaaacataaacttcagctttgaattttgtatgaggtgtgattgtaccagctttagccaatacttgtccacgttggatgtcttcacgagcaaccccacgtagcaatgcaccaatgttatcccctgcttcagcatagtctaacaatttacggaacatttcaacacctgttacagttgttttagcagtttcgtcagcaataccaacgatttctacttcatcaccaacgcgaacttgtccacgttcaacacggcctgtagcaacagtaccacgtccagtgattgagaatacgtcttcgactggcatcatgaatggtttgtcagtatcacgttctggagttggaacgtattcgtcaactgcagccatcaattccatgattttttcttcgtatgaaggatctccttcaagagctttcaaagcagaaccggcgattacaggaacatcgtcgcctgggaagtcatattcagacaataggtcacgaacttccatttcaactaattctagcaattcttcgtcatcaaccatatccattttgttcaagaaaacaacgatgtatggtacgccaacgttacgtgataacaagatgtgttcacgagtttgaggcataggaccgtcagcagcagatactactaagatcgcaccgtccatttgcgcagcaccagtgatcatgtttttaacatagtccgcgtgtcctgggcagtctacgtgagcgtagtggcgagcttcagtttcatactcaacgtgagcagttgagatagtgattccgcgttcgcgttcttctggagcaccatcgatttggtcgtaagcagaagcttgtgccaaaccttttttagataatacagttgtgatagcagctgtaagtgtagttttaccatggtcaacgtgtccgatcgtaccaatgtttacgtggggtttagaacggtcaaatttttcttttgccattttaaaatgttcctcctaaaaatacagtttattttttatatttgataggtagagggcgcgaagccccccatcccttatcatcgataatattgtacacgaaacttcataaaaaatatagctttttactgaatttcgcatttgtgcatcaattattcagctttgccgccgtttttcttgatgatttcttcttgaacagacttaggtacatcttcatagtgatcaaatgtcatcatgaaagtaccgcgtccttgagtagatgaacgaagtgttgttgcatatccgaacatttcagccaatggaacaatcgcgttaacgatttgtgagttaccatgcgcttccataccttcaacacgtccacgacgagcagttacgtgtcccataacatcacctaagtaatcttcaggaacagtgataacaactttcatcattggttcaagaatcactggattagctttcttcgctgcagcacgtaaagccattgaagctgccacacggaaggctgtttcacttgaatcgacatcatggtatgaaccatcgtaaagcttggctttgatgtcaaccaatggataaccagctagaacaccgttagccattgagtcttcaagtcctttttcaactgctgggatgtattcacgtggaaccacaccaccgacaattgcgttttcgaattcgaagcctttaccttcttcgtttggtgtaaattcgatccatacgtgaccgtattgacctttaccaccagactgacgtacaaatttaccttcggcttgcgtagaagcacggaatgtttcgcggtaagaaacttgaggcgcaccaacgtttgcttcaactttaaattcgcgacgcatacggtcaacaaggacgtccaagtgaagttcacccatccctgcgataacagtttcgccagtttcagcgtttgtttctacacggaatgaaggatcttcttcagcaagtttttgtaaagccacacccattttatcttggtcagcttttgatttaggttcaacagctacttcgataactggttctgggaattcgattgattcaaggataactggtgatttttcgtcacacaatgtatcccctgttgttgtatctttcaaaccaacagctgcagcgatatcgcctgaataaactgtttggatttctgcacgagtgttcgcgtgcatttgcaggatacgaccgatacgttcgcgtttgtcttttgaagcattcaagacatatgatccagagttcaagacacctgaatacacacggaagaatgtcaaacgacctacgaatgggtcagtcattactttaaatgctagtgaagcaaaaggcgcttcatcgtcagcaggacgatcagtttcttcgtcagttttaggattgatccctttgattgcaggaacatcaagtggtgaaggaaggtagtcgatgactgcatccaacatcaattgaacccctttgtttttgaaggctgaaccacaaagaactgggaaaaattcaacagtcaatgtcgcttgacggataccagctttcaattcttcttcagtgatttcttcaccttccaagaatttcatcattagctcttcgtcagtatctgcaacagcttcaactaatttttcgcgccattcttcagctaattctttgtactcttcaggaatttcagtttcttgaatctctgttcctaaatcgtttgtatagatctcagctttcatttttactagatcgatgataccagtaaagtcatcttccgcaccaattggtaattggattggatgagcatttgcttgcaagcgatcatgtaaagtagatacagagtataagaagtctgcaccgattttatccattttgttacagaatacgatacgtggtacgcggtaatctgtcgcttgacgccaaactgtttcagtttgtggttctacaccagattgtgagtccaatactgttacagcaccgtcaagaacccgtagtgaacgttgtacttcaattgtgaagtccacgtgtccaggagtgtcgatgatatttacgcggttttctttccattgcgcagttgtcgcagcagaagtgatcgtgatcccacgttcttgttcttgttccatccagtccatttgagaagcaccttcatgtgtttccccaattttatggattttacctgtgtaataaaggatacgttcagttgtcgttgttttaccagcgtcaacgtgggccatgatcccgatattacgagttttttctagcgaaaattctcttgccattctaggttgttcccctctcattcttacttaaacctaagctaaggttgtctcagtaccttccaataaaaagcagtgaggatcttaccaacgatagtgagcaaatgcgcggttggcttccgccattttgtgtgtgtcttcgcgtttcttcacagaagcaccagtgttgtttgctgcatccatgatttctttcgcaagacgttcttccattgtgtgttcgccacgcaaacgagcgtagtttaccacccaacgaagacctagagttgtacgacgttctggacgaacttcaactgggacttggtagttagaaccaccgacacggcgagctttaacttccaatacaggcataatgttcttcattgcttgttcgaaaacttccaatggatcatttcctgtagattctttgataatgccaaaagcattgtagataatatttgcagcaacaccgcgtttaccatcaaccattacacggttgatcaaacgagttactaattttgagttataaataggatctggtaaaacatcacgttttgcaacaggacctttacgaggcatccgtaactcctccttccgaaatatcagttctgattaaatagtttcatttgtagtttgaatcaaaattaagctttaggacgttttgttccatatttagaacgagattgtttacgatcgttaacaccggcagtatccaatgcaccacgaacgatatggtaacgtacccctggtaagtcttttacacgtccaccgcgtagcaataccacactgtgttcttgcaagttgtgaccgatacctggaatataagctgtcacttcaatcaagtttgacaaacgaacacgcgcatatttacgtagagctgagttcggttttttcggtgtcatagttcccacacgagtagctaccccacgcttttgaggtgagttaacattcgtttgagcttttttgaaactgttgtatcctttgttcaatgctggtgaatttgatttttcaaccttggatttacgaggtttacgtactaattgattaattgtaggcatccctagttttcctccttccttgattcgctttatagttccacacatccaggtggttctttttttgcgataaaaaataatgcattctctgcattcttatcaaatatgctttgataaacagtcagcacgtctccaacgagagacctgtagataaagcacctttgatagaataccatgataaaaagactctgtcaaccatctctccaatgattttttatgaaaggagtaactgccaaaattttataaaaaaactctcccttgcgcctcctttttacttcttcttactatataataaagatgaaaatagtattttattagaggtgggtcaataatgaatctaaaagagatggtcggtattgaagcggccagctatgtcactgacggtatggtcgtcggtttaggaactggttcaactgcgtattacatgatcgaagaattggggcgcagagtgaaagaagaaaacttgtcgatcgttggtgtaccaacatcctgggcatcaaaaaaacaagcagaatcgttagggatcccggtcaaaacgatcgatgaagtggcaagtgtcgatttaacgatcgatggtgcagatgagatcagcggagactatcatggaatcaaaggtggcggtgccgcactgctttttgaaaaaatcgtcgcaacctactctaaaaaagttctttggattgttgataaatcaaagatcgttgaaaaattaggcgcattcccattacctgtagaagtgattccctatggcagtcagcaattgatgcgattgtttacagaaaaaaactatcaccctgtccttcgcctagccgaagatggcaccccgctaaaaactgattgcggtcattacatcattgatcttcatctacaaaccatcaatgaaccagttgcattggctcatgaactagatcaaaccgtcggtgttgtagagcacgggctcttcttggatatggtccatacgatcatcattggacaagaagatggacctgagacccgcagcgttcgctgatgcctctagcaacaaaaggagcaagtgctccttttgttcgaggttctacgtatttttcttcatttttctagagttaaattcatttttgtgcaagttttctctatcatttatgcctcatttatgctacattcaaataaaaaagaataggaaggagcggctatgaaagtcatcggttatgctcgcacaacaattattgataaagaatcaagtgaacaattaaacaaactaaaaaaatttggttgtacagaattgttccacgaaacctatgcctacgaagaaaactgtgataaccactcattagaatctgtgattgctcgtatgcagtctggggaaacgctggttgtttctgaacttcatcgtttaggtaaaacaacccggcaattaactgaattgacagatcttctaagaaaaagaaaccttcacctagtttctctagcagaaaacatcgatacgagagaacccatgggggcgatttatttcaatttaatggaaggtttggcagcgatggaacaagccttaatcaaagaacggacattagtcggattgaacaatgcccgaaagaacggcaaaattggcggacgtccaaaaatcgatccaaaaaccatcaaaaaaattcgccagctttattatgataaaaaagagacgattcaattcatctccacaaaatgcggtgtttctgtcggaacctgctataaatacataaaactttcagaagaagaattggataaagtatacagtcattaatcacttgtctgaatccggtgcttcatctttttttctgtgcgccgatcctgtcagacaaaatgattcagaaataaaaaagaacgtcttgaagaaagacgtttttttctgtttctttttttaagaaacaaggttttacgctaaatacgtagaaattctttgcgaaaaagtgtacaataaacagggaattgaaaatttcagaaaaatatctaatatctaaaaggagagttttacatgccaaaattagtattttctcgtcacggactaagcgaatggaataaattgaaccaatttactggttgggccgatgtagatttagcgccagaaggtgtcgaagaagcaatcgagggcggacgtaaaatcaaagaagccggcatcgaattcgatgttgcctacacatctgtattaactcgtgccatcaaaacttgtaactacattttagaatattctgatcaactatgggtgccaacaatcaaatcttggcgtttgaacgaacgtcactacggtaaactacaaggattgaacaaaaaagaaactgctgaaaaatacggagacgaacaagttcacatctggcgtcgttcctacgatgtattgcctccattgatggatgcatctgatgaaggttctgcagcaaacgatcgtcgttatgcaatgcttgatcctcgcgacgtacctggcggcgaaaacttgaaagtaacgctagaacgtgcattacctttctggcaagatgaaatcgcacctgcattgaaagacaacaaaactgttttagttgccgctcacggaaactctctacgtgcgttagcaaaacacatcgaaggtatctctgatgaagacatcatggatcttgaaattccaacaggtcaaccacttgtttatgaattgaacgatgatctaacagttgcgaaaaaatattacttataatcattaacagccaaggctgtgctgcaagtcagagcaagagtattcttcctgactgacggcacagtctttttttgattggtttcctgagaaatattcgttataattgaaaccgcatacgaaaggagcttggaatgatgaccacactctgtaaaaatgatacgctactatttcttggagatagcatcaccgactgcggccgtgatcgactcgatgctacggatctgggaaaaggatttcccgcctttgtggcagcccatctagctgcagaatacccagatgcaaacttgtcatttgttaaccgcggcattagcgggaataaaattcgcgatatcttaaatcgcatcgaggaagactgcattgatttaaagccagatctactgattttcttgatcggtatcaatgatacctggcgcaatattggcacctcctctttcggcacacccgaagcaactgcgacatttgctagtgattatcggcaatttttgcagcaagtgaccgaaagtgggatcaagaaaatcctgcttttagagccatttgttcttccttatccagcagatcgcaaacaatggcggaaggatttggatcccaagatccattccattcgtgaactagctgctgaatttggttgtgactaccttcctttagacggcttattcgctgaacgtactgtcaaaaaacattcatcttattatactggggaagatggtgtccatccaacaatcgccggacatggtgtgatcgcacaagagatcttgcgccgtatccattattcaagataattctttgatagaagtacgcagacaaataatcggtaggataccaattaccctaccgattatttgtctattctgtcaggatttcttcatttagagatactctgaaggggtcaaagcctcttgataaatggcaatgacatcagattctgtcaacggtacgtaggcatttgtcgcaattgaactaaatgctactgcttgtttggccatttcttcaaaatgacgatcatcttcgatccccacttctggtaaagtcattgggatcccacaagcaaggaagaaatcgtataacttttgaatccccatccgagctgccatttctgggaccgcttcttctacttggaatacttcacgggcaaagcgagccaacttaggtgctgttgtctcattcaacacatgaagcatccagcggggcgtcaagatggctaagccgatcccatgagtaatatcataaaaagcactcaactcatgttccattggatggcacgaccacgcaccggctttcccactacctgtcaacccatttaacgccaatgtacttgcccacatcaagtttgcccgagcatcatagtcatctggggtatccaaagcaatcggcaagtttgtgattaccgctttcaacagcccttctgcgatgccgtcttgtacatccgtattctctgttgtactaaagtagttttcgatcagatgactcataatatctgcagaaccagccgctgtttgatagcgattgacgctaaaggtccaggtgggatctaagaaagaaaccttcggcaagaaattaggaccgtggacccctaatttttgtttcgctgtaaggttcgtgataactgctccccgattcatttcactaccagttgcagctaatgtcaaaaccgtaactaatggcaatgctggcccttggtagctgcgtttagtcactaaagtccaaggatcttcctcactgcaagcagcacctgcgatcactttgctgcaatcaatcacggagccgcctccgactgcaagaatcacatcaattttttcagtgcggcagagttctgccccttttgctactgtttcaatccgagggtttggttcaactcctgctaattctgttacttgattgtcattgttttgcaattgcgccatgacttgatcataaagtccgctttttttgatactgccgccgccatagaccaataggacattttttccgaaagtattcaatacttccggcaactcatttaaccgatctttcccaaaacgtatatccgttgtcacctgaaaagtaaaattattcatgctccaacctccttttctttaattaaaccattttcgtccaaaagtgcaactattccaactagctagaaagattcaatcaatcatttaacaaaaaatcactttctgactggctcccattgtctaaggagtcaatcagaaagcgatacaggaataaaaaattttttgtaggctgtaggataagaaaaaggattaggagatagctgtttctaagccaactttgatcatatcattgaatgttgtttgtctctcttccgctgttgtttcttctccagtgatgatatgatcactgactgtgcagatcgctaaggtctgtacgtggaattttgctcctaaatagtaaagcgcagcggcctccatctcaacacctaatacaccaagatcagccaattccactgtttctgccatatcatctttatagaaagtatcttccgataaaatgttcccaacgtgggtggtaaagccggatgcaatcgctgtatcatacgctttacgcaacaagtcgaaatctgcgattggcggaaaatgaaaactttgaaagttctttgctaccatggaagaacttgtcgctgcagcttgggcgatcactaagtcccgaacatgaacatctttagaaatcgcgccacaagtgccgacacgaatcaatttttttacgccataagaattgatcaattcatgggcataaatggtcgcagaaggcatccccataccagttccttgtactgatactcgctcacctttgtagacaccggtataaccgagcatccctcggacattgttataacagatcgggtcttctaaaaatgtttctgcaatgtattttgcgcgtagaggatcgccaggtaataaaatcttatcagcaatctcgccagcttttgcttcaatatgaacgctcatcttttcgctccttttctacttctcttttatgctctttttttagggcttgcttgttttacagattcgctaaagtttctttgatcagcgctttaaattcggctttgacccgttctgttgtctctacgacttcttcatggttcaggcttgcttgcataccagcagctagattggtgatacatgaaacgcccaacactttcaagccactatgaacagctacgattacctcaggaaccgtcgacatacccacagcatctgcaccgatcgtacgagcaaatcgaatttcagcaggtgtttcataagtcggcccagaaaagcccatgtaaactccttcttttaagtggagaccttttgtttctgcaatttgttttgctgtttcccggtagcttgggtgataagcctggctcatatcagggaatcgtggtcccatttcttcttcgttagccccaatcaatggattgtcccccatgaaattgatttgatccgtgatcaacatcaaatcaccaggttggaaactttcattcactccgccgcatgcgttcgtcacaacaagtgaatgtgcttcaagggccgccattactcgaacagggtaagtaactgtctgcatggaatgtccttcatagtaatggaaacgaccttgcatcgccaatactttttttccagataatgtaccataaactagttgtccggcatgcccgacgactgttgaaactggaaaatgagggatatcgttataaggcagcacaattggattttcaatctcatctgctaattcacctaatcctgaacctaagatcaaaccaaaatcaatagatcctacccctttttccttgatgaatgtcgttgtttcctgcaatttctcatgtaatgttgtcatttctccacctctaatttaaatgatttaagaagctttccccattttctgttgccggtactgcaaagttttctgcaattgttgctgaaatatcggcataatggccttggggtagttggccttgtcctttaaattgtttgctgtaaaccaataatggtacatattctcttgtatgatcagtcccagtaaaggttggatcatttccgtgatcggctgtgatcattaataaatcatcgtcagccatggcatccagaatctctgggattcttaaatcgaaatcttcaatggcatgagcataaccgacaacatcccggcgatggccgtaaagcgcatcgaaatcaactaaattagtaaaacttaggccggtaaagtcttgcttcatcacattcaatagctgatccacaccatccatattgctctttgttcttactgaatcagtgattccttgaccattgaagatgtcattgatctttccgacagcgatgacgtctttgccagcatctttcaacgaatccaacactgtgtgtccaaaaggatccagtgcatagtcatgccggttgcttgtccgggtgaagtttcctggttcaccaacataagggcgagcaatgatgcggccgatcatatatggttcatctttggtaatatcacgcacatattggcaaatgcggtacaattcttccaacggaatgatttcttcatgagctgcaatttgcaagactggatcggcagacgtataaacgatcaaatcgcctgttttcatttggtgttcaccgtaatcatcaatgactgctgtaccggaataaggtttgttgcagacgattttacgtccagaaaattcttcgatttgttgcagcaattcttgaggaaatccgtcaggaaacacacgaaacggtttttgaatattcaaacccatgatttcccagtgtccagtcatggtatcttttccgacagagatttcttctagtttcgttgcatagccgtcatggtctgctacatttttgacaccatccagcggtcggatcgtaccaagacctaactgttccaaatgaggaatcgtcaatccagcttctttggcgatatgtcctaatgtatcagaaccaacgtcaccaaatttttctgcatcgggcgcttcaccgatacctacagaatccattacgatcaaatgtacacgtttaaacattcttttccctactttcttttattgttattcttttcttatcatactagaaataagaaagatttgcctttaaggatgtttgagatattgggtttcttgctgctacacaaaaaaaagggcagggcacagcaacacaaacatgtcccatagccccaccctttcatacagaaaaaattatttagatttgatgtagttcttaccgttagctttaggtcctgccgctttcccaaggaacagcactagaacaataattgttaacgcatatggtgctgcttgtagataaaccgctggaatggaggaaatgattggcaattgtccgccaacgatactgatgttttgcgcaaagccgaagaaaattgcagcgcccatcgcacctaacggattccatttaccaaagatcattgctgccattgagataaacccttgaccggcaatcgttgttacagcaaaacgtccagcgattgattgggcaaataacgcgccacccattccgcctaggaaaccggagatcaacacgccagaatagcgcatcacatagacattgattcctaaggtatctgctgcctgagggtgttcacccacggaacgtagccgtaagccaaatcgtgttttaaagatgacaaaccaagcaatcacagaaatcaagatcgcaaagtaagcaggtaaaaacgtttggttaaagaagactggaccaatcacaggaatatcacgcaacacaggaaaattgaaataccctaatgtttgttgaatattgtctgtttgccctttgttgtagatggctttaactaagaagacagccagcgctggcgccatcaaattcattacggtaccactgataatgtgatctgctctaaagttgatggtggctacagcatgcagcagtgagaaggccattcctactaacccgccgactagcattcctaaccaaggtgtccatgcaccaaattgtgacgcaaattcaatattgaaaacgatcgaactgaaggcacccatcaccatgattccttcaagacctacgttaacgatcccgcttcgctctgagaaaacgccgcccagtgcagtcaggatcaatggtgcagcataaatcaacgtttgtgtgacgatcgaagaaattaaactgatattcattagatggttcctccttcctgatcttgattatttggctttgcttcaatttcttggacaacagcgacttcctttttgccatcaaagattttagctaatacaaaacgaatcacgtagctgatcgcaacgaagaagatgatgatcgcaatgtcgacatcaacaagttctgaaggaatccctgcaaactgcattccttgtccgcccagtttaagaacactgaacagcaatgcagaaagtaaaatcccaatcgaagacccgctgcctaataatgagactgccatcccatcaaaaccaatactcaatgacgaaccttgaacgaagaagttttcaaaagttcccaaaccttgaacgacgccacctaatccagctaatgttccagagatgatcattgaaataatgattgtccgtttgctgctcatcccagcatactcagatgcggttggattcaaaccaactgctcgaatctcataacctaacgttgttttcttcatcatgaaccaaatcaacacgaggaagatcagtgccatgaaaataccaatgtttaaccgggaattgttggtcaaatttgctaagaaaggtgtttgtaaagaggcattgtcgcctaccattttggtcacaccttttgttgtgatcatggattcattcatgacgttattgacgatatgatttcctgtatacaataaaatataattcatcataatagttacgataacttcactcgtaccaaagaaggcacgtaagatacctggaatagctgcagcaattgcaccacaggctgcccctacaagaatagcggtaggcaacacgatgattcgaggagcatctggcatagacaatgcgacccagatacttgctacccatcctgctaatgcttgtccagaaagaccgatattaaagaatcctgcagaattcgctactgcgaatcccaaagctgtaaaaatcagtggaccagctgtaacgaaaatctcaccaatatttctagcattcaatccgccgttttgaccattgataaatacggtacggaacatttgaagatacccatcgattgggctgtagccaaatgccgccatgatgattccaccaaggataaaaccaagcagaacagcaatgatcggcacaagcaggttccgaattttttctttgcggttattcaacagaaccacctacttcctccatttgtagctcgcgtcgggcttcttctaatgaataacccgccattagtaatccgagttctttttctgatgtctctttcggatcaacgacgccaacaatctcaccagcatggataacggcgattcggtctgatacgttcaaaatctcatctaattcgaagctgactaacaagacagctttgaatttgtcccgctgttcgatcaaacgtttatggataaactcaattgcgcctacgtctaagccccgtgttgggttcgctacgatcaaaagatccggatcacggctgatttcccgtgcaataatcgccttttgctgattcccgccagagagggcacgagcaggaacaatctcattgactgtacggacatcaaactcttggatcaatccacgggcaaattcattcatttccccgtagtccagcacgccataattgctcagcggtttttgataatacgtttgtaaagcaatgttttctgaaagcatcatgtctagaaccaatccatatttatgacggtcttccggcacatgcccgacacctgcctccgttactttacgaggtttgaaatttgtaatgtcgtcaccattcaataagactttgccgctttcggattttcttaatcctgtgattgcctgtagcaattccgactgtccgttgccatcgattccggcaatccccagaacttccccagcccgcacttccaaacttaagcctttaacagcctctaggccgcgattttcttttacaactaagttttcgatagacaggacgacttcttttggttctgcaggttttttcggtgttttgaaggaaacagaacgaccaaccatcatatctgccaattgctgtgacgttacgtctttgacattgactgtacctattcctttgcctcggcgaatcactgtacaacggtccgctactgctttgatttcatccaacttatgagtaatcaaaatgatggattttccttcccgaacaagtcctctcataatgacaatcaattcttcgatttcttgtggtgtcagtactgcagttggttcatcaaaaatcagtacatctgcaccccggtataatgtttttagaatctccacacgctgttccatcccgactgagatgtctcgcacataagcatctgggtcaaccgataagccatattgctcagaaacccgtttgatttctttgcgggcttttttacggtccaacacacccaatttatttggttcgcttcctaaaatgatattttccgtgacagtaaacgcgtcaaccagcataaaatgctgatggaccataccaatgccaagtttattagctgctgtagggctagtaatattcactttctccccattcatcaagatatcgcctgatgtcggttctaacaaacctgacagcatattcatcaaggtcgacttgccagctccgttttccccaagcaatgcgtggatttctcccggccttacttgtaagttgacatcgtcattggctttgaaggttccaaactctttggtgatatggcgcatttctacaacatatttttcttcagccaagtttctcacatccttactttctaattcgctctcacactcagtgacacaacaatttttaatacaaataaatgctattgcttaggatggttattatcctcatgaaaactcaacagctttcatcaagacattaaccactaaagatgtattagcaagacgagcatctgaacgatagcgaatcgctcaactctactatcgttcagaatttcttgtctttttttttcattgtttaaaaaaacttgcttatttttctggtttttctggcacttcaactttgccatcgatcacatcttgttttgctgtttcgatcgctgcttttgcatcatctgataagaaaccttcagtgatatctacaccgccgtctttcaaaccataaacgatgtgttcgccgccagggaagttatcttctaatgcacgtgttgaaatatcttgtacggctgcgcctacacctttaagtgttgaagccaatgtgaagttgtcttctttgccgtcttttgttttgtatgcaccttcgtcttgttggtcgctatctacaccgataacccaaacttttttgtctgcaaggtcagcttcgttcaattgttcattgattgcttttgcttcttggaagacaccagcaccagtaccacctgaagcatggaagattacgtcaacgccgccttggtacattgaagctgctagggctttcccttttgcagggtcaccaaatgatgctgcatattgagaatcaattttaatctctttgcctaatgctttagaagcatcttcgacacctttgataaaaccagcttcaaaacggtcgattacgacaccttcttcaccgccgataaagccaactttgtttgtttttgttgtataagctgctgcaaaaccagctaagtaagctgcttcgttgtctttgaaggttgcagaaacaacattgtctttgccttcgatgacatcatcgataatcccaaattgagtatcagggttttgtgctgcagctgcttcaattgaatctttcaataggtaaccgacaccaaaaatcgttttgaatccgttttggacagcaccatttacgtttgttgtatattctgaagcttcatttgattgaacgtagtcatatccaccaacaccgcgagcgatgttatgttctttcccccaagcttccaaaccttcccaagcagattggttgaatgaacggtcatctacaccaccgatatcggtaacgattgctacactgtgtgctgcatctgttttgccgtctgcagaaccgccgcctgttgaatcagtcgaacctgactttcctccattgccacatgcaccaagtagtgtcaacccagccactgcaacaattcctaaactaaataattttgcttttttcattgctgtaaagccccctataaaatagtttttatttttcaacagccgcttcgactgaatgaacatggtttatagatctttgttcgtaaaataatatggcagcaacccttcgacagttgtctctttgattataccatcgtctcccacaagagtgactggcatatccggctgacagaactcaaccattacttggcggcaggcgccacaaggtgagataggctctggcgtatgaccagcaacaactaagtgttgaaagtctttttcgccttctgaaattgctttgaaaaatgcggtgcgttccgcgcaattcgttaagccaaacgaagcattttcgatattgatgccttgatagatggttccttttttggtgaccaagcaggccccaactggaaatttagaataaggaacgtaagctttgtctaatgcggcaactgccgtttcgatccactcttttttcgcttttgtcatgatgaacctcactttattgaattagtagccagcccccgttgaccctgtaacgattgctacacttgcactggttcctaaacgatttgctcctgcttcgaccattgctgctgcttctgcttcgttatggatgccgccagatgctttcacacccatttcagggcccactgtttcacgcatcagtttgacatcagcaacaaccgctccgccagtagagaatcctgtcgatgttttgacaaaatcagctcctgctgctttcgctaattcacaggcctttacgatttcttcattgtctaaaagtgctgtttcaataatgactttcactaatgctttgtctttagctgctgcaacaaccgcttcgatatccgcttgaacttttttgaactgttttgatttcaaggcaccaatattaatgaccatatccacttcatcggcaccattcttgatggcatctgccgtttcataagctttgacttctgatgtattggcacctaaaggaaagccgatcacggtacaaacagccgtcggttcaccttttaattcttctgctgccaaagctacccaagtaggattgatacagacagaataaaagtgataggtttttgcctcttcaatgatgcgcaagacatcttcttttgttgcatctgcctttaaaatagtgtggtcgatcatgcgatttaattccattccactcgctccttattctgtaatgatttcatggatcaacggtggctcaccgccgctttctccgatttcaatattttgatagatcaattcgatgacatcatcgatggcttctgtgttgctgtagatcgttaacagtgcttcaccttgctcaacagactctcccacttttttatgcagtttgattcctactgcgtgatcgatgtcttcttctttggttttgcggccggcacctaacatcatagctgcgatgcctagttcattggcaacgatcttagttacgacgccagaagtttttgctggtaatgctctttgataattggcagtcaagatttggcttggatcatcgatcactgaatcatcgccaccttgattacggatcatttcacgaaatttagccaacgctttaccagagtgcagtgcctcttccaataatgcgcgtgcttcttccaacgattctgctttttgagctaaaacaaccatttggctgcctaatgcatagcacatttcttctaaatcagctggaccgtttccttgcaatgtttcaatagcttccactacttccaaactatttccaatggcttcgcctaatggctgtgacatatctgagatcacagccattgtctgacggttcgctaatttgccaatccgaaccatcgtttgtgctaagcgtttggcatcctcaattttcttcatgaaagcaccgtcaccagtcgtcacatctaacacgatggcatccgcacctgctgcgattttcttactcatgatcgagctagcgatcaatggaatcgagcttacggtcgctgtgacatcccgcaacgcatataattttttgtctgcaggggccaaatcccccgactgaccgataaccgccactttgctttcgtttacgaggcgaataaactcttcttctgcaatctcaatctgaaacccgggaattgattctaatttatccagcgtaccgcctgtgtaaccaagtccacgaccagacatcttggcaactggcacaccaacacttgctactagtggtgctagaatcaacgtggtagtatcaccgacaccccctgttgaatgtttatctactttgatgccttcgattgaagaaagatcaatgacttcaccagaatttgccatagctaaagttaggtttgtgatttcttcatcggacatatccacataaaaaatagccatcaacaaagcactcatctgataatctggaatacttccttcagtatacgcagttacaatgtagtcgatctcttcctttgtcaatgacttaccgtcacgctttttttcaattaaatccaccattcgcatcaaaatgaccctcgcttcctctgacattatacaatatttttcttgtaggtaaaccactttagtaaaacggtttactatataaaacaaaactatgaaaacacttacaattggaaatataccgcactatttcgcaattgtcaatgccttcacgctctcacgaagaattaattttgtatcaaaaatcttatttggaattcttcgagaaggaaactcgatggcgtctaccaaaaatttcgctgccgtaaagccaatctcaaaggttggctgcatcaccgtggtcaatggtggtgtgatgtattccgttagcttcaatgcgtcaaaaccaatcacagaaatatcctcgggcacttttttccctgcttcatagattgcttgataacagccgatcgccatagcatcattcccacaaaaaatagccgtaagctcgcggtatttcaataatttcttgcaggcatcgtatccgccggtcactgttaactcagccgactccacgtaacgccctttaaacgggatctgatgatctttcaacgcatgacgataaccattgaaacgttcttccaattgataataaccagtactttcttttagcataccgatgttttgatggccattattgatcagatagctgactgcttgataagcgccttcgtattctttcacaatcaaacggccattgtctctttgattgattccccgatcgacgagaataattggtcggtcatcaaaaaaaccgctcttcaatgaatactcgtcaggcagctgatgcggtgttgccaaaagaataccatccactgatcgatgagacagctctctcaaatattgtatttctttttcttggctatgtcgggagttacacaataccagcatataccccaatggattgaaataactttctgctccttcaatgattttagaaaagaaaaaatccgtaacgtcagggacaatcataccgatcgtttttgagtggcgattgattagattcgaagcaaaaaaatctggcttataatggtgcttattaacgatatccagtacccgtttgcgggtttcttcactgaaacggctacctttattgttcagaatttgcgaaacagtagttacagatacccctgccatttcagcaatctgcttgattgtcagtttcatttacttctcacctctttcttgcctaaagtgtagcaaattttttctaaaaaaaatagcaccccttgctttcttccaaaattttctttttacaagggttaaaaaacagctccattccttaaaaaaatcgacaaaagaaaacaaaaaataaaagaccagcgattctaggcagctcctagcaaatgatcgtggtctttaaaaaacaggtaaacctgttgtgaacgtgaaaaacgtctgctttgcgcgcttattctttgtagctttgaataatataataccctttgtcttttttgatgatttcggcattaccaaaggtttgttgcattttcttttgggcactgggggcaccttgtttcttttgaatcacgatcgttaatgtgccgcccgttttcaatagcggcagagcccctgtcaagatctcatgaacaacctctttgcctgcccgaataggtggattgctaagaattgctgcgtattcgccttgatgcaaggtttcgtaaatgtttgaggcatgaatgtcggcattctcgatgccatttcgtttcgcattgccttgggcaagatcaaccgcccgctggttgatatcgatcatttccactggacgctgggatgcataagccaatgacaacccgatcggtccatagccacaccccacatccaaaatcgttccctctggtaaatccgcccattcaaaggcatcaatcagtacgcgagagccataatcgacggtctcccgggaaaataccccactatctgtcacaaactgaaatttctttccttttaactcaaaagaccattgttcaaaatcatgtgctgtttccggattttctgtataatagtgatttcccatctttgttcacccttttttcttttaactagcgatagttctcgctttatctgtttgacaatcaaaagcatttcatttgctgactcttttccatgataccgaaattcctgcagaagtaaactcccgataatcgtttcctcaatgaatcttagataattttcgtttctttgccaacgatttttcctggtttttttataagttcctgccatttctatggtaaaatatttccgagcagcaaccagatacagaaaatcagccttttctgaaggccaagtaccggtctgcaaagatagacaggttctatatgaaggagtcgaacatgcaagaaaccatgaatttttatcaaattcctcgggagcaatggcaaggcttttacaccaatggcatgatgcctttcactcaagaagaattagacaatatcaaaagtttgaatgaccgcatctcggtccaagatgtcgaagatgtttacgtgccactgtgccatctgatccacctttatatgaaagaatttgaatctctcacgttaagtaaaggacttttcttgcatcgttatgtcaaaatgccgccattcattattggcattgccggcagtgtcgctgttggtaaaagcacaacggcgcgtttggttcaaaacctgttgagccggcttttccctcggcgcaccgtgcaactgattactactgatggctttttgtacccaaacgaggtcctagaagcacgagggatcttggatcgaaaaggattccctgaaagttatgacatggaagcattgatcaattttttgaacgcggtgaagtctggagaatctgaaatcaagatccccgtttactctcatgaagtttataatattattccggatacgtttgaaatcatcaatcagccagatattttgatcgttgaaggaatcaatacattacagctgcccgcaaaccagcagatttatgtcagtgatttcttcgacttttcgattttcgtggatgcgcagcccgatctgatcgaaaagtggtatttagagcgttttgaatctcttttggatacggcttttcaaaaaccaaacaattattactatcagtatgcgattggcgaccgcggtgaagcaatcaaaatggcaaaagaagtatggaaaaatgtgaatttaaagaatttacacgagtatatcttgcctacacgcagcagagccgatataattctccataaaacaaagcaccattcaatcgatgaagtattcttgcgaaaatattgactgcttcattattcacccttatgctgttgaaaaggaatcttccttttttcaataaaactaaaagaatagaggtaatttattgtgacaaacgttgacaacatgccaaacgttgaaaaaattatcgtactcgattacggtagtcagtacaatcaactgatcacccgacgtattcgtgagttcggtgttttctcagagttattgagccaccgcattactgctgaagaagtaaaggcaatgaatcctaaagggatcatcctttctggcggtccaaacagtgtgtatgatgagaaggcatttggtattgatgaaaagatttttgatttggggatccccgtgttaggaatctgttacggtatgcagttgattacttataaattaggcggaaaagttgaaccagccaaaaaccgcgaatacggtaaagcagaattggaagtcacttctgccgatgctgctcttttccaaaatacacctgtgaaacaaacagtttggatgagtcatggcgatttagttacccaagcgccagcaggttttgacgtcgttgccaccagcaaagactgtccaattgcttctatccaacatgcagagcgcaaaatgtatggtatccaattccatgccgaagtccgtcattccgaatatggcaatgatttgttgcgtcactttgcaatcgatgtttgccaatgtacaggcgactggacaatggacaacttcattgatatggagatcgctaagatccgcgaacaagtgggtgataagaaagtcttattaggtctatccggcggtgttgattcttctgtcgttggtgttctcttacaaaaagcgattggtgaccaattaacgtgtatctttgttgatcatggtctattgcgtaaaggagaagccgaacaagtcatggaaagtcttggcggaaaattcggcttgaatattatcaaagttgatgccaaagaacgtttcctatccaaattggctggtgtttctgatccagaagaaaaacgcaagatcattgggaatgaattcgtttatgtctttgatgacgaagcaaccaagctggccggtgaagaaggcgtgtctttccttgcacaagggaccctttataccgatgtgatcgaatcaggaacagaaacagcacaaacgatcaaatctcaccacaacgtaggcggtctgcctgaagatatgcaattcaaattgatcgaaccattgaacacattgttcaaagacgaagttcgtgaattaggaacccaattaggcatgcccgacagcatcgtatggcgtcaaccattcccaggaccaggtctaggtatccgtgttcttggcgaattgactgaagaaaaattagagatcgtccgtgattcagatgccatcttgcgagaagaaatcgccaatgctggattggatcgcgacatttggcaatacttcactgtcctaccaggtatccgctctgtaggtgtaatgggtgatggccgtacgtacgattacactgttggcatccgtgcagtcacttccatcgatggcatgaccgctgactttgcccgcatcccatgggaagtcttacaaaaaatcagcgtccgtatcgtgaacgaagtcgcacacgtcaatcgaatcgtgtatgatattacgagtaagccacctgcaactgtggagtgggagtagttgtaggagagctagaaatcctcttataccaagggtttctggctcttcttatctttttactgcacttttattgcacttttttcatttctttgtttcgcaagtagtctacagtaaattgattctttggtgaagtatcataattttgttttgcttctttaaaggaaatggctccatttaatttgttagctacctcgaaattactgttaggataaagatgtccatacgttcctaaagtcgtctcaatatcttcgtgtcctagacgatctttaatgataagtggattttctcccatactgattaacaaggaagcatgagaatgccgtaacccatggattctgattcgatggataccagccagcttagcatagcgttcaatagcatatgatagtgtatgtttttgggtaggaataccgttatagctcattacaaagtctgtctgaattagattttgttgtacttccttccattcggataaataagttaatgtgcatttatctaatacaatatgacgaacgctcgcctttgtttttggttcaacaaatctataattcgattgattcttgtaatagagtgttttgttgatggttagtactcctgagtcaaaatcaatatcttcccattgaatggcagtagcttcaccaattcgcattccagtcataaataaaaaccacagagagataaataaaaagtgttgatagtaatcttctttgtaaattagagagattactttttcaaattcttcttttgtccaaaattcaattttagacttttgctttttcacattgccaataatcttagatggatttgtggtggttatcccaaggacaattgctcgatccatagcaactgaaaatagtccttgaacagctcttacataagaagacttacacttctttgataattttagttgccaattttgcacatcaataggctcaatatcggaaacagccattttatcaaaataagagaaatgcttcttaatagttggtaagcgattttcatatgttctgagctttacctgtgtcttataccatggaaggaaaatttcaaagatataatgtttaaacgtcattttatccttattctcacttaattcttctggtttcatcaatagcagtttcgaatattcttctcttgcttcttttttagtagtgaatccactacgatatttttgaatttttttccctttagaatcataacctagatttgcacgaaaataataggttccattctttgctttttttattgggtctttaaccatagtttttactccttactgtgcaaaaactactcagacctgttttcatttgaaaaccgaattcctagaatttcttcaacagcttcacgagggactctatctagctttcgagattgatagtagatatgcccttttgtaatcatcaattcttttgctttttttatgatgtctgctgaaaaagaagttccatatcctagctcaactaaatccttttttgtgaccgttatcattattactcctttcccaattataggctaggaaaactccaatattcacctataattatatcaaatagttttataataatacactgacaagagaagaatatcttagcaatcgaacagctctagcaaagctcacaggaatttcacttctgcatggttctcatgtagccgtacccattgcctgtgacgcttctaacgctcggactatggctatacgggagtatcattatcacgataagaaagtcatggcagcaatcctgctaaagattactttcgaattactaacatgaatcgctcactaattttgtaggtcatggcgtgttagttcatcagctcttttcttaccgaaacgtattcgattgcctttatttggttgtcaaagaacgtttggcttgttagcctatcaaaacctactgaacacacaatatgctttgatggaataacaaacctcccaaatcgggaagcgtggatacgattcgacacgcttccacgaaaaaatgggactatttaatttcgaacgataaaatcttagagatgagtttcgtttccattctgccacgtagggtttcatcaataaccatatgagaatttccatattcgtctgtcatgcgacgtaatgaacgttttgaggtataccctcgataatgtttaacaatctgattaattgcttccacgtcgccatctgtcgcctttacaatgagggggaagggaacccttggataagctgttttcattctttacactccttcatgaattctttaatcatggctagtccacttattcgatgacgataaacagtcgaacgattcaaatttagtaactccgcaatctccacatcactcatatccataaagtaatgaagtaaaataatgttccgttttttctctgaaagatgacgcagggcttcacttaataaatcactttcaacattgattcttaatccaaataatttaaatagttggaaatcagtgacgtacgtatcaacagtagaaaaagagttgacaaggtagttatctatatcagaaaacgagacttcttttgctgatagtctgtctagatgtttgaagtaatcttttcgttcatcttcaataacttgtttgcagatatagtcaaactgattttctatggtttcttgaaaagaagatggtttcatgcttttcaccccctttctgtcgtgaaagggagtggcatgtgcttctttatctcccttcatactaagccccgacacgaaagggggatttgttgcataaatgaagagaaatcctaaaagatatttattaagtgaccaaaaaagcacataaacagattgttttctctgttcatatgctttgatttttctatctatgtaatctgcaaaaccacattgatggtcatatctatccagtacaggtggataagtttttttgataagaacttaattaagagaactagatgacagattatctttctcatggcgacttttccctccattaagtcgccaattttatctactttctagaagtatgactaaattttataaagttgtataggtaaataaaatcagcgacctttctatttgaaattggattcatcgcattaataaattccacagtgttctataggaactcataaactatataacatgtttttctatacctgtttatggttatataggaacagtaaaatgtatagaggtgatttagtatgcgtaaaaaagaagataaatacgattttagagccgttggtttagcgattaaagaggctcgaatgaaacggggtcttactcgtgaacaagtgggaacaatgattgaaattgacccacgttatttaacaaatatagaaaacaaaggacaacacccaagtacacaagtgctgtatgatcttgtatcattactccatgtatctattgatgaatttttcttacctacagataatttgattaaaagcactcgaaggttacaggtagaaaaatacatggatagctttacagacaaagaactatccttaatggaagcactagcaaaaggtatcaatgaagcaagaaatattgaaggctagtcagtaaaattcagataaacaaaaagagccgataagatgagagtttcatttctcaaattatcggctctgcgtcttggcgtctggctctttgattgttattatattcattttttgaacattaattaaagtttcgttcttacatttggggcagtataaagggaaatttttaagtatagtatccactcgtattcgtagtcttgttttatttccacaaataggacacaatatccacttgtagtttataataacaatctcctcctttccactttaattcaaatctatattaaagaatatttcatcttatttaataagaaaccatatttatataacaacataaaacgcactaagttattttattgaacatatatcttactttatctatccgactatttagacgacgggtctggcaaacaggttcgccagtggtaacctgatatccttttagctctgctaaacaaacactaagcccatttgtaaaaaaagttaaatcattgcgataatcttgaatacatcgagcaggaatttctccaataataatgacctcattatttttcagttgagtatttacgatatttgcacaatatttgggagcatcgttatatgcccgtgaaagatattcctgtggtgcataaactttaaaactaagatatggctctaacaattctgttccagcttttctaaaggcttgctccagtacaataggagtaagcatccgaaaatctgctggagtactaacagggctatagtataaaccgtacttaaaacagattttacaatccgtcacattccaaccatataatccttgttcgcaaccatagcgtatcccttccataactgcattttgaaatgattgatttaagtatccaagagaaaccgagctctcatactgcattccacttcccaacggaagcggtgatacagataaaccaatggaagcccagaaaggatttggcggcacttcgatgtgaatggtatattctgcattttttaacggtctctccatataaatgactgtaggctcttttagttctatctccacatgatacttttcttgcaacagtgcactaatcacttccatttgtactttccctaagaaagaaagtataatttcatgtgtcgtagaatccacgtaatatcgtagaagcggatcactatctgagatttccaaaagggcatcaagcaacatttctctctgttcaggtttactcggttcaacagttgtttgtagtagagggtgcggattttcaatcttttttctctgtggcaatagttttgtatctccaagaacactatttaacttcaaaaactcattttgcaaaataacaatttctccagaataagctctatcaatcttacataattcaccatttattgaagtatacatttctgtaacttttattttttctttttctgatactctaaccgaatctcgtaaatgtagtactccactataaaggcgtatatatgcaagacgttgtcttttttttgtatattcaattttgaaaacatttccgcaaagttcagacggacctcgatgtgttgatgaataaaatttattagtaataacttctataaggttatcaatccctatattactttttgcacttccatgataaagagggaacagagaacaattctgaaatcttatgctttcctcttgttcgagttccaatgcttctaatgatttaccggacatatatttctctaaaaggtcatcgtttccctctattaccgtatcccattgttcagattcggtaaagttcgtcacacacatattaggatacagttctaccttctgtttgattacaatttcggcagaaagtttctctttaatatcctgataaaccgttgataaatcaattccattttggtcaatcttattgataaaaaagattgtgggaatccccattttcctaagtgcatgaaataatatacgagtttgtgcttgtacgccatcttttgcagaaatcagtagaattgccccatctaaaactgataatgaacgatatacttctgctaagaaatccatatgtcctggcgtgtctatgatgttcaccttcgtattttcccactgaaaagaggttattcctgtctgaattgtaattcctctctgacgttctaaaagcgtattatccgtcctcgttgtacctttgtccacgcttcctaattctgtaatcgctccactgttatataataagctttctgttaaggtagtttttcctgcatcaacatgagctaaaactccaatattaataattttcatgtgattttcctccattcaaaaacccaaaagggcataaaaatcccagtgataaatacttttatcactgggatttttatgcataaccataggtatacaaagcatacagatattctctggatactttagaatcacatgataaaggtattcttaaactgggtacaaaaaactaagccctcctaaaaaaggacatctaattatttgttcccgctatcaaattgacagtttatttaagaataccttgccgcatatttattaactccttttaaatagtcacttaaataatagcacgtaagagcatatttgtaaaggaatctccaattttttatcaaaaagagtacatgattacaaagtatctgtaatcatgtaccaatatttgttattttacaatcttccaattatcttgtttttctaatatcaactcaaattgcgagatttgggttgcctttgtttcttgatctaaatatttcacagcgacattcacgattacttggttatcttttctggtaaagataggattcaccaattcctcgaaaacatattccttgttaatcataggtaacacatgattacttacatagtaagtcaattctttttctgtggcggtaggatagagctggaaaaacgtttctaaaaagctagtgatttcgtccatcgtttctgtatctactgtatggtcactttctagctgtttgggttggtagtccgatttttgaggtttcttactcattgtcggatttttgataataaccatattatctgattcatctatatggacaaccacatgaaagctagacgatatagtttccttgtctttgtcttcggtaataacttgttcaacagaaaacagtacctcaaaggtgttctcattcacttgagaaacctgccacacctgtatatcgttcacactagaactagtaggaatatccttacgaatcatttcttcatttaatacctgcaattcttccgtcaaataatgggtcaatttttcatttcgtttatcaatggcttcttgggattgttgccacgaaaagtagtctttcgcaaaggatttcacaaaactttctacttggttggtatcgacaatctgctgtttaatgatttctgtttcacggacagtatgagtgtcaatggcagtaaaatttttatagattccaaatccgacactaccaatcaataaaacccataaaacaaaggttaatttcttatgcgtgccaactttaatcatcggaacttttctttgcttgctcggttttttagatttctttggtttctccttcttttcttttcgctcgatttttataatcatttgattcattcctttcttagttatgaataacacgtctagccccaatcagatggtcttgccaataacgactgcttaagtcgccataaccgattgggtcgcctgcatgataaaagcgatttccctctaaatatatcgccacatgagtcacatatgtgcctgcattataggttgaatgaaagaagataaggtcgcctgcttgggcttcttccatagagatttcttgcgtagcgtcatactgatcttgggcgacacgagggagagaaatgccagctttgtcatacacccattgtattaagccactacaatcaaaagaggtggtaggcgacgcccctccaaagacatagggaaacccttcgtatttcaaggcttcgtccataatgacttgcacggtttcatcatcaaattctgttggggaagtgtcggttaggtattgtgaaaccaactgaacataaaactgatttccatagttatatcgccaaccaccattcacaggtatggctatgggattgggatagtctgctttttgaccacccgacttctctttagaaaactgttcggctaattcataggtatattttttcccatgactcctcacataatttaaaaagccaccgccataattataagattggataacagaatctatatccactccttgttgttctgcactggttaataattcactgaaatatttaaccccttgtttgatggactcttcggtactcaaactgttgggcggtaaacccaaagattcggaactttgcataacatcttctgctgtaccgcccgattccacttgcataatggctaagatataagaaacatagtcttcaatcccatattccttaccatatttttcaatcaacggacggtgtgccaacacttctggtgaaacggtcacaccgccttgtggaatagaagaatccttgttgttttcgccactgtccgtatcatctgcaaagaaaatgactaggaataataagagaaaaaagaagagagagaagaccacactacaaatcactgttatttttagcttcatgtttgttgtcctcgcttatccgttcttttatttagcttcctctgattgaattgcttcggtggtgtcttttgtttttgctcttttttcaatggtcgctgatgattttcacgtttagtgttttgtgacaaaacaggcgtgacggtttgctgacgcttgcgaacatgctgctggttattctgaacaggagatgatgggttttcttttcgtcttttttcttttgctttatccagctccaaacgcttttgagcaatgttctttcgtttttgctcctgctggttcatacgctgttgtttgcgttgagctttggtatctgccatagattgtttaaagtctgttacattatgagtgacattctcttttccttgatgaagggcatatttgacatgggttggtgtcgcctgtatctgttgttttgcctgctttcttttattgactagacgatttttcgtgtccaatacatgggctgtcttttcacctaatcgttgcccgataccgccttgttgctttttcacattggaaagtgctgtttctttctttggtgtagtccgttcattttgacgagtatggttagctttattggtttgattctgctttgttgtcattgtcttttgcttcgttgaccctgcttttccacgaaaaatcttactcatactgcgttgaaatcttctggtttgtcgattcatcatttgacgaggtctgcgaaacacttgtctgcccatgttttgagagtcgttgctttgtaaagagaataggctcattaaatcgcccagtttaaaataaatccctgcaaaggtcacaatttgtaaaaacataatcatgaaaaagggagaacttgctgacagcgaataaagcatagtggaaatactaaaggcaacggtaataatcaaggtaataccagcccttgtcataatcacattaaataacttggtaatggcatgcctgcccatgccatcaaaactcggcaacatacttaataggaaactgattggcaaaaacatagcgaaaataataaatagcacttgcgaaaaaatcatgattcctgttagaaggaaaacaaaaatcgagataccaatattgaatacaaacaaaaagaagactgttcctaatctggaaatcgtcttcggtagggttaaataggtattgtcatgatcttcaatttcttcaatcactacattttctctatcttcaccattgtttgtatctggactggtagacaataaactttccacacgttcttcccctaacgcttctacatcagtggagccatattgaagcaatagccatggttgctttacttgaacagagaataagctgtcacgtatcatgtccacactgtctttcccttgactatccgtgttaggaagaacaatttttgtcccaatattcagactggcggtactgacatctttggaaaaatcattgattttcgcaatataatcgggtgcatacgcaataaaggaagccgatagaataaacaccacgacaaagtttaaaacagctcgtatcactttcgtcgtttctcgcttaaccaatcctgtataggcaacatagattccaacaatgagaataaaaagaaggaggaaaccgacataaaaccctgaactggaaaagccattcggtgtaatgcctgcaatcgtctgcatgttttcgccaattgcttgggatgtttgactaatgaaatctaaggcataggcttctttcaccaaataacctgtggcgttcgatagataaagagaaattgtccaaataaaattagtaatggcatacaatccatacatcaccgattgtcctatgccatcactccaattccatggaagccagccccagctattgtccacataataatcaagctgatattgattcaaaccatacttggagtattcattgcttgtatcaatggtttcatcaactaagcctgtcgcttgtactgcattgcccagcgtgcctaataaaagtaaaataacgcccacacaaaggagcgttatccaactatagtgaagaaatttcttttgtttttgtgtcattcttccacctcatttcgcacaggcggtctggtatcaaaggcatgaagcaactcttcaaaaatcgggtgaaactgcataacccctacacgaccatagatgtctgaaactaaacattgtccattttctaattcacgtaagcgtttctgattgttttcatcttccttgtccacaccaaaaaattctaaggtctttttgatttccactaggtcagtggaacgaaaggcaaatttcaagccaatattattcttcatcttttcatctagtaaatcgtccgcgttttgagtaacgaaatagacccctgcattcatggcacgtcctgctcgaaccaatcgcatagatagagcttttccttgtgccacttgtaaaaaactccaagcctcatcaaggtcaacaattttaaaaatggaacggtcagagtggataaagtctaaagcaaaggtactaatgacaatcagcattgccacacttaataattccatggtagtgtattcttcaaaagagctattggaatcgggtaagaccaaatctgccacttgaataatattgagttgtttttccaagctaatggattgggtgacactgccatcactgaataacagatgggcaaaatcataatcgacaaagctttcgatatggtcagcaatactattgctgatgggcgtatcttcttttcgcaattcatcaatcaccaataacaaccctcgttgtttgctttgagttacactccgaatagctttacgcaggacaggaaacttctcgctatctcggctggaaatacctgttaagaacgtgagaatatcaatggcaaggctttctgaatctttcgggagttttaaaatcacataagggtcaagtaaccctttattgtcgttctcactcgtgagattaacaatattgatttcatgggcaatatcaggtaaggtttctttccattcaccacgttcagcttttgggtcaacaatggttgcctgtccgccaaagagtactgaataatagaccagcatattgttagagaatgattttccgccacctaatgaaccaataaaagcggacgctaatgcatttgttacagagcctttaattccttgacttgcaaggctaggttggagataaatatttctgcctgtatcgagattgtaaccgacgtaaataccagaattttcaccaatcatttgtgtagcaccgaaaccaagaccagccaaaaaatccgacgtgacatattgaatatagtcattgatatatcgcttgcttgagggaataaattcattatgcaagcctagcatatcgccaaaaggtcgtactaatttgatagacagatcatcataaaaatcttttacttcatcacaacgttgtttcagctcgtccaaattctttgccgatacccgtaccacatagcttagtttgtacatagattctttggtttggtctaaattactttctaattcatcgacagattctaaagcgtccaccacattagtactggtttcgttgtcgctttcccatgcgtggctatctaaatctttcagttctttctttttattgcgaacggtagataaggcttttttattggcgacaatttcaacattcatactggtatcaacggggaaagtaaactgctgttgctggtaataaaaaatttcactattagggaaatccaattcaccaacaatactattaattgtaaaatacgccacataagtagtggtatcttcctgttcaatccgtaaatagcgttgattttcttcgattaaacagcgagtgggtttgagaatatcgtatttctttaccaacacttttttatcttcgtatcgtttcggtaaatggtagtcgtagtcatcaaaagggacacctgtttgcccgtaaagatgttcaataatataaccaaaatcatctttctccaatttacgaatctgaaagcgtctggataatttactttctaacaactgttccatcttagaaaagcgttcgatttccgccataggcatagaaacaaaatcgcccattaatttgtgattcacaccatgaaagaattccgcaaatgctttttgaatttctttcccaacattttttacggatacttcctgttcattgaggtagagtttaaaaccaataaaaaagcgatagtctacttgattgtcaccaatcatagaaattaacgcttcggtctgttcatctattttttcgtaagctatctcttttaatcgtccagtgatttcttttttcgattgttcctgtgtggctcgaatacttgattcggttgctagttgcagagcatgaatcttgccatcacgattttgggcaatcaattgacagaaattatcatgaacttgaattttttcatcggaacttaaaaaactgtaattatagggaattaattcataataagcgaatacttcgccatcatgattaaatacgagattatcttccatatatttaatcggatatgccatctagttgttcactccttacaatcgtaatcgattcattcattgtttctttttttaatcgtatttgtttgccagcgtaggttactttagggcgtagagcataggtaatgatagactttagaaatccatagggtttctttccgtcaaaggtcttttggcacatgaacccagtgagaacaatgggaatccctaagtatttgagtagtgctccgtcaatcagagaaagtggtggtaaactgccaaagagtatgacgacaaacaaagaaacgataaaccatgtcatttgcgtaaaggtaattgggaaagggagttgtaaatcattaatcgcataaatcactttttctactgaccaaatactggtgtaacttcttatttttttcatgtcttcacgtcctttccgtaaaaatagaaaaagaacaatcaaaataggtgattgctctttcaatgctttaactattcaattttattttttgtccattttgcaataataccttcatcagtttcttcatcatctggactcattgaatatctgaaacttaaattggtatctgaccctaatcgttcatataagctgggtctatacaatctcgttttattgtcattaaaaggacttcgttttcccagctcaccatttccctttaaaggatttcttctaactgaaaaacaatatttttttctgggatcttctgaatcactttgacttaatgagaaacacatggcttctttttggtcttcatttttcttctcactaacttctgtcggaataaatcgagcaagagtttggctaaattgaaataaaacatctcccaagttactactgtattcgataccaaaatattctcttattgttttcgtgtctgtatataattttaccgaattagcatagacagctagcatatctgaaaaatcgttttcctttaaaaattctagttttaacagagcatattctggaactttttcctctttttcaaatagcttaacaagtacaatataattttgctgtttgtaacgaaagtaaaaggaatctatcacccagcctttatctttcatgtctagttttaatagtttaagattttcaaatacatttaccataatttatacctctccgtgctatttattaatttaattataacacggattgttaaacttactgacaatattcaaataccccatgagaggtaactaggtaattaccctctatttccatatcacgtcccaaagattggtagtcaatataattttgtaaattggaagggacttcaccaagctgtcctgtttcttccacgtaataacgggcgacatcttccatcgaatcacaatcactataacaatgaatatcctctttgttttccagtaattcttccaagctactaaaccacatgccttgaatttctttgagttcattataaataggtgtaccttcgatttcttgaatggcttcacatagacggttgatttcactaatcggcgtgtattcgtccacatcaaaaggaagctcaaaatcatgtattgcatattcttcgtagtcctcatttaaaccgattctttctgccatttcttcctcatcaattggtggagtaaaccatgctccgactaattcaccttcattataccgtcctaaatttgccacatagactttcatttccaattcttatcacatcctttttataaaaatagtcataaaaaaagtagcaatcagttaatgacgctacttatcaaggtatccgctaatataatctgtaactgtacttgaaatacctattattagttttgcttctctctttccaataatatttgtattagggtgtgcaagtgaatgcctatttcttgcttcattaagagagctaatcattccatttgatgaccttatcgttgtcttcactatatcagcaagttcagtaggttgaatttctttttcaattaattgttgtatcctactatataatttagatagattttcgtctctaggaactgtaatttcatatttttttagtatttcaattaaatatccatgaaaagcagtgtgaactctgtcaaaggcacgttgatattcaccattactcataaaagactcagcgtcttcaatagcttgtgaaaccacatcactaattttcaactgactaaagttaattacttcgtaattctctggaagtggtactaaaatagtatccactaatacattatcaccttgtttatcatatatggagcttgctgtctgggtaatcaaatctttatgactttcaaaaaagtctaaatcatcaaaaggaactcttattttaagatatgtgcaaagcgtattccagccctttttatatcctttataataagtaaaatcgtcagtctcatctaaagttacctctgatattttcattttagaaacaatctcgttacctccttcataataatttgaagagctctttctttctaatgttttaattaaaagagatttaaattgatcatttgtaaacatattcataaatcctttcataacaaaatatatacttcctattttatcatgaaaaatatctgttaagcaccaatgattcggttaaataagtttaataacacatctttcacgccagctgcattgaacacaagtccgacggcgattagagcaataatcaagaagccaatgagttttgaaaattctcgtttaaaacctaaaaacagtccaatgacaacaatcgctaacaataccaatgactgtgcattatccaagaaccagttgtacaaattctgcccaaaattcatgtgattgtcctcctttccttaagatatttttctcgataatagatatagctttttacacgccttaataattgaaaaggggttaaatgctctccatagacggttactcgattggtataattattataaaatctcaccttgtaaaaatcataggtatagatggtatcaccagcttgccgttttccctcaataatgagagacgtatatttccctgtattttgtatatacgcttgaaactcaatgccacactgaaaccctaacttctttaattcttttgttaaaaggctcatgtaatcaaatcctccatggctagatgttgttgttcaattaatttctcatgtttttctgtcagtttggcttcctgaatcatggtggagataatggttgtaccgttgagaacatctaaaatgcttgcgatttttaatgtaggggcgacttgatgatgtaaccagttcaatgttcgttcaaaagaataaggctctggctgtgtggttaggcgtaatgctccacgatttttaccgataaaccattcccaacgttcattagttttccaatcactccgacgtttagtgtcgtctttatctgcaaagcggatatagcgattgataatttcaaaggctgttttttccgcctgttgatgtgccaataaatctttcatggcttgggtggctcggtcattttttaaccgaatttcaaaccgattctttacttctgcgtcttctaagggaacatcatttttcacgtattgctcataatctttctcatatatacagaaatagacttcactttttaatgagccaatataaagtgtgtttcccatgtatggtttttcatcacggtgaaccaattcaccactgcgataatttttaaagcttcgaaagacagaaatgcattcttcctgtttacatttctttgccaaatctggaatattcaaaatccctgttttatcgttgatagctaaatccaagcgtttgaaaatacctttatgttccatgcaatcttgaaagaaatcataccagctccgatgttgagccaatagaaagttttcaaattgccgacagccttttcctttcagttctaataaaacacctttacttacatcatgagagactaggacaacaatatcaccgaaacgatagtgttcgggataagaataatagccaaagtcttcgtgtagcatataatccatattcaaacgtaaaacctcaccgataatttgagccacatcattggtagggaatcgaatccgtacatagtcgaataacatctccaatgggttatcgggattgaagcgttccaaagcgttcagtaaatcttctttcacctgttgagtagggactgccttgcctgtttcaatatccgataggtaaggtctggtaatatgagaagcaaccgccagtttattttgagaaacgccataagccagtcgcttttctttcaattccttaatccaaattttttcgttttccattcgcaaacctccaatctaaaaaagatgtaaactatgacccttgagtttacacctttcatattttccgcaatcctttgtaccatcaacattggttgatgagaattgcctgttttcagttgtatttgtgcccccctgttagatagagggggctaaaggattggcgtggctaacgccacaccaatcaaagcaagtctgaacctgtacctttcacttcgtgcggtacaggctcagattgctttttttgaatgacttttcctatttctcctaagaaatcgtacctttttggtacaaggggtgtataaaactcactaatcacactttttcctgtatccacgtaacctcttcccttgatgggttttaagaaaaattgtttttgtgtatcgcttccgaacatcataccaaagcccatttcagacatacgacccaaagccacacggaagttaaagttgtcccgaatcccatcactaaaatattttgcgtctggacgttgacaggcaagaattaaaaagaagcctgcttgtcgtcctaacattacaatttgtttgagtttatgaataacggtggtactttcacgacctagcatatccatcattgccacatattcatcaaaaataagaaaattggcagacaaaccaagataagcataattttctcctgttttatagttagggtgttgtttcatggtttcactgcgatcaatcatatcttcgtaaaattgattgatacatgccaacatatcttctttacggtaatagacattattcatgaccgcccctaagtctgccaaatcagcatttttagggtcaagaatataaagctttgcatttgtatgcaggagagattcaatcaatgtgagaataaaataggattttccactaccagtgcccccagcaattaacatgtgagggagagaatcgaactcccaatagaccgattccatcaatttgacacgtccatcttgagctaccacgtcttcaatgccaattcgattgccaatagtatcataaagtaggacatactctacataagaatctttcaacgttttttccactaattcacaatacaatcctgtttctagtttgttttctaggtgcaaaagctgatcttgatatttccctaaggtgatttctacatgaatatggattagtccatctttcattcgataatatattttaggaaaatggcggattcgttgtttggttttcttgctgggtaaatctttaaagaatccctctgattgagtttcttcggcttcataccaatgattttctaaaatcatacgagctaacttttgacggtgctctaactgttttatagaatctatacgatagtgataataaagccagctgataagtccgcatacaaaaagagcagtgagaatactgctccaaaagtatggcgtatgaagttgatagaaaaatgtatctaactgaactgcttgccagttcaccgattgtaacgctctccaatgaaaagggagtaggacgactagaaaaactaccagcaatgaaattagtacaaaatgatagaccaagtgcttatcgttggctttgattcgctctcctctgtcatgaagcaatggcataaaaatcctcctttccacctatcaaaataattgtgtattgtagatacgagcctgtttatcaaaagttggttgagaaatggcttcatatttctgataagcgattcgcttttcaaagcgtaaatttttttctttcggataataatgacgtcgatagagagtgtgtcctaacagttttttcgcttcttttgtcaacggatagagatagcgaaacatgcgtccattgattttctcaatccctttgtattcgcaaaatgcctgggaaagccaatgcttttcctctacctgttcaaagcgagcattttcctctaataaaaggcgagcacttcgagggtgtatcttttcccatgactgcttatcacgatagacacttgtcttgaaatacccgcagtaaaagaagttggacgcttgatagacatagccacattttccctcaattccatctgccagtgtatataaaaaatgacagtccgtatgttctttcaaccacttaattagagctgaaagagcttgactgccaaaataattggtttgattcatttctggaagaaaacacatctttccaatttctaaataatctgtggtttgaagggaactgtcgggaaagagtttgcgtatggtttgtaggggttgcgtaccccagcctaattccacaacgcctaataatttttcttctgaaaaaatccctagaaagtatttacacaatctagggagtatctttgaataatggtattgccgaataaaagaaatggcttcatctttcggaatttctttcaaaatcaatggtgtgtttgtcataagcaacacctatttttcactttcggacgcttcttttttatatttctgatgaggttttgtctgtccttttaatacaagatcgtctgctttcacgtaccaatcaacgtctgcccctcgaaaagtagccgtcgctacggtatctgccacaggattgattaattccacttctgcgttgtagtcaaattctttcaaaggaacagaagcggggatactgacttgtatcatgcgtccttgtccttttgattttaagtcataggtacgttctttaatttcttcggaaaccgtaccatcttcattctggatacgaacctcacgacgcaaggcggaaaatttcaatgtgccaaatgtctggtctttttcaatcacaataccttctgctaatctcatattttttcacctttcctttcttatgctttcaccatatcgtctgcgtgcataatgtaattggtaaatcctcgattgccaattttataaccttctgcggtaatatgtgggttgatgagtttgactttttcgtcggattcaaaatgtttctcgccagcttcggagggaagaatgacaacaatatcatctgctcgttgaatcgttgagtataaattgtaactacgagagagaatggttggtctgccatttattcgacgttgttcaatgttcccttcaccagcatattctaattgtccaaatgttttttccatattgggaatgacatatttaagttccatatttttacctatcctttctgtttttatgtttgaatgaatcttatttgtgtgatggttttaaagggggggagagcgaccttttgattcttgattttttattttcataagttcacttcctttcaaaattgggtaaaaaaatagacgctccgtactgagcgtccgattcctactatatttaaaacaacgactacctaggtattttaaatattataatcaaattctattttatctaataattgagtgggataaagcaagtctcctttactcgtaaaataacccacctctgagaaaagaaataaattattttttgctcttgaacaaattacgtatagtagttttctcgctgaactaattcctttatcagaaacattaaaaatttcattccaatgaggaattttcccgtttagaagattaatagcgataacagtatcatactcatttcctttaactttatgtgctgtagtaagtgtgataccatctcgagatttaaacatcttcttaaaactagatacactactagataatgaattattttttatccgatcttctacttcgttaataaaaaatagatagtgcttaaaaatagacgggtaatttttctcgtcaatattaagattaacaaatatatgtttggtaacaaatttgtataaatcaacaccgttgtcgtctccactatacattcttttcacactgtttattagctgtaataaatctaagtcaataaaataatctttaacttctattccaaattcattttttaatataattaaaatatcgtttgcaattagctttcttcttcgaaccttttcacctgattcagtaaagtacaaaattgctaacttgaaaaataaactatgattatttaccttaattggtgatatatttatagcatcaaaattgcaatacggtaattctttctttaaatactcacccagtgaaaacagaggatagtgttgaggagcaagtacacaaatatctttttcatgaatgccgctttcaatcttttcctttattatattttttattatgttgggtaaatcctccttagtaactttgcaatcataacttataaaaccacggtcgtttttattattccctctgctttcaatctcgtaaggacaactctgaaaattagagtagaagtctactaatctctgattagacctgtaacagccatgtagcgtctttgattgaaaagtgtgactagttagcatttctagttcttcaactgatttagctataccatctaatgatccataaattgcttggtcaatatctccaacaaacattgactgaatttgagggttgttttgaagtaatttagctattacattgtattgtaattctctagtatcttgaaattcatccacataaatcgcccttatattactagcaatattacgtgcaacgttactgtttacagttaaaattttatgcgctactagtaaaatcatatcaaaatcaatttctttatttttttccaacatagtgtgatacatttcagaaacttgagtatactgaacttcattaattttaaaatcatgagaaagtgacaaatcaattttgttcagttcatacgttttgagatttaaattcagcatattattaatttggctgacgtaagctctttgagtataatcatcaataattgtaaatccttttgatactcttgagagattcattttaaaaggataaataataaattcaagacaaaactgatgtattgtccccacccaaatattaatatcatcatctatactaagtaaacttaggcgttccttaatttcttcagcagctctattagtgtatgtgatagcaattattctttttagtgatccatcgtgtttaattgcttggtaagcaattttccttgtaagtacccttgttttcccactcccaggacatgcatttacataaaggttatcttcactttccacaacatctttttgttctaaatttaaatcatttacgattttttcgaagatatttgtcattttgaaacctcagcataaagtatttttgtgtaattttctatctgattgattagatacacaacatcctcatctttaccaaagtactctaataaagaaattattgctatattcaaatcagctgtatcacttgtttttaaactagctgataaagctgacaattctgtagtttcctcgtacaagtcgattgtatggagtagaatttttttataaattgagagatctactatttcctgacatgcaaaagcaatagcattaagaatatacttaggaattttgattaaaaagtcaattttttcacctaactcaattgcaaaccaccccttaccaacatgattggctagttttaacatcgctaaatttctttctaaatattgttcactttgtatttcttctttataagcagttattgtttttttatctttgaatgcgtcatctataattggactgacataagttagaatattttctttattcacatctaaaaactcaatttcaaatgttgtattagcataaaaacaattaacccaattgttttcattaaaaagggaggataatttttcttttcttgcttgacctttctcttgtgcagtgcttttatacaatcgatgttctgatgggattgcctgttcatctaaatcagttacaatagcacactttctctgtattctatcatcgtcaaacaagctagcgatatattcaaacgaagtactaccaacattaatcaaacctattccaagttcgtctaagtttataccaaataatttttttactatttgaggaataagtatttcttcagcatctccttcaactaagataacacctttagaaaaaagcaatccatttcttttaacatctaaatatctctctactgcgtttattagatttagattgttcttttttaacttttctttagcaaatgagttcagattatttgctggattcataacgatagatttgccattaaacgattttaatacattcatccgagatatttcagacacttcagctaaatgtacagaatgtgtggtcatgagaatctgagtatagtttttttgaagatttaatccttcgaacagagttttttgaatatgatgatgaatatgagcttctggttcttcaatcaacataatattaagtagttctcttgaacgacacgcttcaaattcgactattttcaaagctaaataaatcatatttagatgtcctaaccctagtaagtctaagtcgatattttgttctggcttcattgaaagaaattttgctaaagaacccatatcatctgacatagttgaggaaagaagaagattaggagaatacactgaaccaattatgctatttagttgccgattaatattttcgccaattttcctaatttcaggaacactggtaatagtctcatttaattgctgtataattgtttttaatgactcaacattatctgatgatatttttgattcaattgtttccatgattcttttgactgggtttcgattgtttttcatttctctaagaacatctcgaagagcgtcaacataaacaaccgaaatatgcttgaaaatatctgacatgtcaattcttgagcccaacagagcttcatcgtcttcttcaggattactagctatattgtcattgagtcttcctaccaatttatcataattttcattgatacagaaatttagatttgatttagatgtgtagtaaaattcatagtcggatagacgaatagaatttctaaattcgttaaattgatgagagtctaattcagtggaaatatcaaataattgctttctaatagctttgttaggtctaataaatagagaaatactacctacacctttatctgcatttgaaatcaattcttctaagattgtttgactttcagaatttaaagaaatggaagcacaaatctcattgtcaaattcttcttcgctgattccttcaaatgtcgcagagataataatccaatgcccttgccacccattttgaattccatgaaaaaaatctgattctttcagtgttttactactatagtaataactatcatctaataagattctcaatgcagtaagagcattggttttccctgaatcattctcacctataatagtatttgtctcattatcgaatcgaaagatttcggattcataatttctaaaatttcgaatttgaagagtagatataaacataagcagatctcctaactatttaattaatatgattatatagtaagtttatcataaattatgttagtaaaagttctcattataacaattgggttaaaaagaaaatagatagtattctacctcatatttatttgaaagtaatatataaaagacgttcaaattcgaacgcctctcgttaaccaaatattggattcagaatctagttttcatatataaacagagtatgattaggtgcaaaaattgcacttttattgcacttttatttttatttatagtgttttactgttctgtatattgttttaactcccttgatagtatcgcattctgttttatacactttacgttgaaaacagagtgggaatagtatagattaaaagcctagaagctgattaatcagtgtttctaggcttttttaggtaattttggtaactaaaatggtaactatttatataattccgtcttttattattttatttgcattctctttcgcaattctaaatttttccctattctgatcagaatcaatatcagtgattttcattctaagtaacatttcaggatcaacatcgtatcctgtaaaatcttttttcattgaggcaactaaactagcgcctaaataaagcaattcaaacgcattgaaatcttttgatgtggagggtcttttgtaattatactgttgaaaaagagctccaatatacactgttctcggagatccatacatcattaattcttttatcatatccctcaattcctctttttttaatttacctattctatcagtatcagctattatatccatccatttaaaaaaaaggttttcgattttatctcctgaaattgatcgataataattatcaacttgtaactctcttgttgttttgtgttccttttcttgcattaaactgctgttattattctttatttcttccatatccttctcatgaattctctgtggtataccagatattgcattctctattccttttcttatccccataaaaccgccacccacaatgattaataaaacaatctcaaaccaactatcttcaagtattcctaacatgttttttcctccttttagatataccacaaattcatttaaaaatttaatttgtattttcaaaaatattgatacttgattatcaagttctatcggatctagactttttattttgatttggtaacccttttagttactattcaatatttatcttatttcaagtcctcgtttaatatggtcatattctggcaatgtcaatgaagataccaagattactttttctatttcatcaaaatgaaaaaagcagatgaattctccagtgcattcaattttttgattacatacggtaacaaccttgttccaattttctcttgcggttgctttgggatcaggaataattagtattttatcatgataataaaaatcaaaaggtgggttaattctctcaaatagcaagtgatctttatttatattctcctttctagacaattccattgtagaaatatccagaaaaccaactgatagttttttgctaaaaactaaattgtcattcatctttatcattcacactttcattgctattcttttttctctctaaaaattttttcatcttttcattttggtacgcttcaaactctgcaactaaatccattttttcaaggaatcgatcttgaatagccaaacgtgattctctgaaatctcttcagtcatcttcaaggtcacgtttttccagaaattccgaaaaactattgttgtaaacgaaacttcgagaaggataatgctctcggcgaccaaattttggaagctcaatcccaccttcattttgtagctgttgcaacgtttcaaaataagcagcggcaagtgcttcataaacattatttgcgtctgcatatacgcttatatgcaaatccttaactcctagctcttctttatcaagaaatctttctaagctgatacttacttggttggctctcatttgttatgctcctttatcttgtttattttctccttttctaattttaggatttacccttaactaattgcttcaagaaaaagtcttcttaatttatcacctattttttttatacacttgattcccattccaatttatcagactgtctttagcagtttcgattttaattataccacttaatttatcagcaacgtccctatcaactgtagggtaaagatgtgaatatgtgccgagcgtgatctgaatatcggaatgacctaatcgcttttgaacggctaagggattagctccagcatttattaataaggacgcgtgagaatgacgtaatcctttgggaggaatctcaggaattcctgaaagacgtgcatgcctttttataattcttccaatagtagacttacctattggttctccagtatatgaaattacaaaatcgaaattaccatactttttttgccttaatttccatgcttttaatacagaaatagtatcatcatcaatagaaatgattcttcgacctgcttctgttttcatttttgtttttcttgtccagactttcccattggtgaagtccaaattgttccaaatcttaatttgttgattatcaaaatcaatattatcttcccaatataaagcagttgcttcattgacccgcattcccgtcataaaatatagccatacaatgacaaaacccatgtgctcataaaaatcttcaatattgaacgtttgtatgcacttttgaaattgatctttcgtccaaaactgtgtttcaggcttttgcttggatatacctccaacaatctcaaccaaattttcctttaacaagccatgtttttttgcatgtttcaaaacttttgaaaacataccaaattttagacgagcgtaattttgagagtgtttttctaagagataatttttataatctaatatatccaatgtagttatgttcctaggttttttcattccaaacttatcttttatttcaataaaaactcctgatcggcttttccaagttgaagcttctacattatttttatactcaggtatataatacttgtctaaaaaatcagaaacggtcatttgagcatcagacagtgcccctaaatcatgtttctttttgagcgctgttgttcttgcttcatttgcttctctggcggtaggaaaacctctacggtgttcatgaatggctttacctgttattctatctgtccctagcttaactctgtaaccatatcttttggtggacatatcttgatatacgcctacatatttagtcttccttgttttttcatatgacatctttatcgcctacatttaaactatcgaaagatacaccaattattgcctcaactttttccctaggaaccacgcccaaccgcctatttagataaatagtcaaaccttcattaacaagttgaactttcgcctcacgaattatattttgagaagttgcctttggataacctaacgcaataaggtcatctttatttatagtttttaaattcattgaatcattcctcttctaagtatcgtatagcatcttgatatttcttcattcgtttaaagtctctcaatcctaatggtttctttaacttcttttttattctatccatatcactattatgtttgaggtcagctagcttaaccatcctagcccatttattagcttttactctttctaaataaaattgataaggttcatatttttcttttgttaaagcttttacggccttcactatttcgtcagaaaatatttctttcaaattttcttcagttatctgtgtatcttcaagaacatcgtgcaagtatgctactgctaaaatttcatctttttccgttacaaatttcgtgaattttccaaccataacgatatgctctgcataatctatcccagctttatcaacctgtccttcatgtgcatccaatgccagttttaatgctctactagccctagtatttgctttagctagcaataccattctattcgtatcaactctattcttacttaatgtgttaatagatttattatttctctctaccaaaacatcgtacattaattcttgtgtaccttgttttttaccaacaataaaaccaatatattttttatcgttataaagtaattctacatagtctcctatactaaaaatcggttcctgcattttaatatccccctccttaataattatcttcgccagacaactcaattactctttgctctatcattgatttatcgacttctgtaaatttctcttttccttcctgaactaattcattaaggtaaactttcgctaattctattccatggacattttccaaagtttgataaaccattgctaaggactttgaagtagatttttcaagccagctctttttttttattaaagttagcttttccctcttgattctgagtggaattttatctgcctgacaaataaaattatcccaccacttcatattaggcaaacgagatttattgtgaatttctatttttttattctgtgtcttgaaactgtagtgtgctgctaaaatccctcgaataacataccctaatggcttcccctcacctatcagcacagcaacttgttgagcttttttatcagtcaattctaactcccaacgaatccattttcctatgataatttcatccgcattgactaatcgttcgtttgctttatcataaattctaagaatttgaggagctgatcctatataaatagtaaaacctgtgagaacaccatccgatattcttccactatttatctcaacaaatttatgagctttagttgatagctgtcctcgtttaatataatcttgaatcgttttgacacttggcgataaatcatcaaatatatctaacgctaaatcaattctagtgattgttccgtttaactcaatgattgtttttaaaaatttttgccactgccatccttcacctttattcatgtattcctcatattgtctacaagcttgccctgacagatttatcagggcattagagtgagttgttgaaaaatgtacctcaatattggcgaagcaaacttttttatgataattcggaaaaggactgcctaagttttcagaactaaaatcatggattgatatacctaatagttgggcaaccttaggcaaatcataatctggcattgaaaatcgcaaaaaatctataaggcattcattactttgccttttcatcaatgctatcaccaactacaaaacttttggcaattactttaagctctgaataagcccatgttgaagccattggacttccttgtttcacgaaaacttttttttcgattttctttggaaccaccataagactgtcgaaatgaagcgggataaattcatctgcttcaaatttttctaattgaggaagtgataattcattagactgatctatagctataaagccattattatttgcatacttttctacaacaatagtgattggagaacctatttccgtaccaccattattaaccactagctcgatgaaatttcgatcgtaaattttgaatgtcaggttgtacaacccagtctctactaattcaccaacagaattgcgtattttttcagctttgatagtaatatcttccttcaaggttaccattgctttcggaacattgaattgattaatatcgaaatagaagttcgatagttcaaccgcttctgaatcgtttaaagcttgtaattttgattgttttaaaattaattttgacatgaatagttccttctctcgtttttgttattttataatcccgaactctcgggattccaaaagcggtctcccgcctactcgcacaacacatctagaaaaaccgtttgagtttaattcccctgtgttactaacagggtggctccgctatttttgttattcgttatttattcgctttcgcaattgctcaagctcaactcaacgagcgccctaccgttccactggtcgctcagctcagtcttttcaagactgcctagaacactcgttgagtttcttaatcatttgcctaacaatacacatatttcctaataaaagttctcgggttttacccgaacccatgagctgaatcagctcaaccatctaatcactcgccgttaggcaggaaaacaatgggcattgttttcagtgctttagtgtgtatgcttatcgcagtcaagcgtaaatcagcataaagaaaatatttatatgatttacgcttgactgctactacgtttttcatcactaccaatatacaattttagctcttcgataaagtcaaattcatctgcactcatataaggtgcttcataatattgtgctgtttccttacctgagccttgcatatagagcaatcctgagccttttacatcaatcggagggatagtttcaggcatggcatttcccatgaccatccgatatccatccaaggagttagatcccagtgcgatacgcagccctaaattatcgcgtaattctgacgatagattttctgcacgcatttgttgacctgctatcagcacaaatactccagcctgacgtccaagcagtatcaactgttttatgccatccattacctcatttaccacttccttagatttcttctctgtagctgtagcaacaaatgcccccatctcatcgaaaattacccaaatctgtttcatatcatgatctataaagttagaaccatatttaaagttggcaggatcattcatatattcatacctcttttgcatttcttctacagcgcttcttataacacgagcgatattattaggagtagttgcaactttttcggtgcctaaataaactgagaggcttcccaggtctgaattttttggatcacaaatgaaaacttcgctgttttttctggattttttacttctttttctgaaaatttctaaaattaaaaagcttatgaaaacactttttccactacctgtaccacctgctacaagaatatgaggtgtctttgttggatcgtagactactccgtatcctaaatctattttatgactatcattataagtaggttcacctgttgaagttaaatgcaaacgtggtggtttgactgtctggaaatggtattctacgactccttctctaacaactttttctgttaatggtaggttgagaagtgcggatatttctatttgtaaaccttccaatctggaggtgaatcggtctccattttttatcccataaatgataatctcgttctctttttcctcataagaaaattcagcagattccattattccatctttctcagagtatagattatttgaaagaagaaaatccaacaacattaagtcgtaatcaaacgttctttgaaaccaacatcgcattttcttaatccatccatgctgttttattgctatagcaaagctaacaagccacattacaaagatagctattgaattatttaaagtaagagaaaagaacaatgtaataattattagaaagaaaattgctatacgtaccttttttaataacttagggtactgtaaaaaagcattcctattctctaatgacacatatgatcgatcaccttttatttttctgaaaacttcactcatcatactagcactaatcatattttcccctcgctacattcttctgaatagactaattaaagctttaatacgtaacttaacttcgaagtatagtgaaacaaggagtattaatccgccaaaaactgctagtggtatttgaagtgatgtagcaacaattgatatcattaataaaacaattcctagtaaaagcagaaggttcgctctaaatttatcagtcattactttcccgcctttcttttatacttattgataccaattctggtagatttgcaactagtaaaatcagtgatagcattaacatagcctttaatccctctataatattaaaggattgaacagtccacgtaacattcccactcagtgaagcaaaggatgctatcaagagtaacagcacccacgttgaatttctgtaaaagttattcaattttccccttcccttctatctgacttgaaatcatgtataccaagattgatagtaaaccaatagggataatatcatcaaaatggtagtaggtttctaggattttctctttgccaccagtatcaggcatgatatatccagtaaaataactaaatcctgaaactcccacgataaaaactaacaatgtaattgtcaaatacttccaaatattattttttttcatttttatgtctcctcttttatattagctaagagaattactatcagactcttagctaaaaataagaaatgaaatattacttatcactataattatcctcaacaaaatattttttcttatcatcaacattttttattttttaaatctcagcaataagcattgcatgatctggataccctattttattcatatagttcctatttttcttgaaatcccaacaatattcaacttgtatgttttttctgacatttgagaaacagtgatctaatttaaaaccattagcccaagaataaccttcatttggtgtatatacttgataattgatattttccatctcttgtaccaaaataggataagagtaaaactgacgtggttttcccgaatatgagtttttattgtcagtatcggtataccatccattattgaaatctcctaaaactagactcggctcaccttcaattttgcttattacattcactaatgactctaattgagttcttctattttcaaagtcatggttcaaattccttccccctaccttgattctagttcctataaaatggtagttattatcatcaattcttgaaacaacatgcaaaaaatttggattattatcgtcgttactaatcacaaagacatctgtctttactgcatattctttttttatagctaacagaatttcattccctaaataatcagttgttcgaggatcagtaaaagtttcatatccaaaaacgcttaactcatcaataaaatcttgatagttttcaccttttacaaattcggttaagcaaaccacgtctgcatttgttttcaatagttcttcaataaccattttaggaatcccaaacttactcgatctgcaatttatattccatgtaactattttcaaacttattactctcctttataccaaatttcggcatcattttttaaatacatatcatcaactttaagacaataaacagtttctttgtggtctctatataacagtccatctaccaattggattaatggacagatatttgaatggcatacaacatccacaaaagaagtagcatccatagtcacgatttctttattagtagtttgataaatgatattttttgggtaacatattattactcctccatatgttcgtttccatcatcatcaacccaataatcaccgtttccgatcgctaccattaacataaattcttcatcatactcgctttcaaattctttttgatccattctgttacctccaatcaattttagtcaaaccttatatacatattaccttacaaatggatattaacacatattcattttgtaagcaatgccttacgaataaaaaataaaaaaaaagacattttgaatgtcttttgcgcttttaactagcttataatatcttgatttgtttctattatacttaaaacatatctaataatatctgctgtaggtgttgtatgattaatgaccatttgaactttatactgagtatacaattctttattaactcttatatttattttcgaatagtttttatcttctatattaaggctattttcgataacaacgtatttatccacttgattaattatatgtcttgttaaatcttcagtaacagtgattcccttttttatcataataattttatacaaatcagcaaccttttgtttcattctgattgttacaatcattgtatcatctttatcttgcatcatatttatctgcctctttctatacatattaacttaatgccttactatcataataatcaattcctgtttgcttttcaatctatatttggtaacttttcggtaacccttcaatcaaagatagttaattagaactctttttataaaatcctaaatcgttaattcatctgtactttatttttatttattttatgaaaaagtcgagtgggaataataaaagaaaccgtgaatcctttgatactaaagggattcacggttcttttttgcttttgaagttcttttactgaagaaaagatactatagagaaacagttatcatatcatcgtctgagattagtcgtattactttacatgttcaacttctgctttttaaataaaaattaattttgtatactattcttaataaaatgaaagaaaatcaaaagagctaatatgttttttagcaattttcagaagaaaggagggttcttttgagcaaaacgataaatctgactccgcccataaggcaaagcttcaccatcttcatcaaagtagtaaataaaatcttgcgcaaataaagtagcccgctcaataaatcgctctgaccattctggatcttcttctttcataaaagtagcatagatcaaaccgtaataatgaaaggcaaaagcaacataataatcgcgttgcgttacttttccatctacgtaccatccatcaccaatatacatcgaatcgatcaacgctaattcttgtgtaagttcgttttttgccaatggatccccacactgatacaatgccacccggatcaacactttaaagaatgtccaattgtttttgggaatcttacaggttaatgcgtgtgacaaccactttttcagtgcttgttgattcctttcaggcaattgctcccaaacatattctttatgtagtaaaagtgttaatgccaatgccgctgcttcaacaatatattggtcatagtccgtgatctctccccaataattttcgctgccagggtcggttcctgtcattaatttagcaacataggcatctcgcaacggatcatcttggcatgctgtccaataaggtgcgatcccccatagcggacgtacaagcgcttccatctctgcacgcttctgatcatatacagcaccgctgctacctaaattcaatcctggacgatcagtggacaaaatagctgcccgcaacggttgcatgatttgttcaagtgccgcttggtaatcctgacgagtcaaaaaaggattctcttgtaacgacgtcattgtcagccctcctctatcgatttacaaaatagaatagcaagcaaaccgggctttttcaaccgttctcattctatgaagcagtgataaaaatgagagatttttctctcgtatttctcacttaacctattaacaaaagaatgacccgtgattctatctcaaaagaggagtcgcagtccgaaaaagttaacctgtcaaatatgaaaagtctatgatagattcccagatttctcgaattttttttcataatttttttctaaaaaaaagaccgacacatgttttggcgcttgaataaaaagttggctttcaaaaagctgcagacaacttactctcgggcgtgagactaagtaataccccatcaagctgtatctgctaaatagctcataaagtttctcctgtcggctctttctctcaataaggaatgatccgaggagcagacaagacaacacccttagttcttgactgcaggaagaaccattcgccaattcataaaaaagaagagtgaaaagaaactagaaatgacccatatacagggaacgaattcaaacttaatcacagcgctgctcactttgaactgatacaaggatccagctaaaataagggttagtccgatactggcaaacagagtttttaacaacaaagcaggtcttaacggtttgctgcgaatgtggataatgaccttagcaaatacatgggttaggaatagaatggttaggaagctcaatattccggaagagagcatgcttagcttcaatgctttaccagtctcttccaccagaacaatgcaaataggatggataaaataataatattgtgacagttctcgtaatttttttaagcaggagttctgcgttggattttttgagagcagccaaagaaataagaaaaaactcaacggcacaagcatcaagataaaattcatgtccaatctgtgaatgtgagaaaggaacagaccttccaacacgaacaaacttccaaataacaaaagaaaactagaactatgttttcccattcgggatagcttttcctgatgatcatagatgaaaaagccaataagcgtgaaaatcatgccaaagaacagaccatttctagtcgtaaatgttagcctaataaccagatcaaaaaaatctttaaaccaaccagatggtagaagaccatagtaggtctccaaacttccaaataaataaagaactagtgaaatgacaaacactttttgatacgaaaaacgtttcaacaaatttactataaaaatgaccgaaaggataaatgcagggatgtaccataaatgataataggtgccgatatggacaaatccaacaaacaaagccgcaggaagtagttctattggcacttcttgattttgatgaatccagtctagccccatcggaaggaaaagaatgctccatacgacgtaagagttgattaaatgcaggaaatattcttttaaatattccggtctcatctgcatccccttacggatgaaaaatgaactgctaacaaaaaagaaaggcaccgcaatacgacaaataatatttttgataaaaaaattggtctccgcttgaggaataagggtatcacaatgaatcataataaccatgatagcccctgcatatttcattctatccaatgctggataactcactctttttcccatcctatcctccataaactggtagccacttattttttcagcctaaatatatcacagcagagaaaaaatattgtccaccataagtctgaacttctacactggaagataagcaaagaaaagacgttaaaacacattacatccttcaaaaaaagaatgcagcaggttttaacgtctttcaacagtttacagccattcttgctttacaacaaaaaatgagccgcgaatctcgccagcaagtttcgaacgctgacgagcgaatttaaatttcccttctagctcagcaggaaccggcatcccttccgacagtttgataccaactgcacgtttcggaggctttccttcactggttccatgtttttcatagagtaaattaaggaccatgccactctcataatagaattcaggccaaaaaagatcgtcatcttcgtaaagtgctacttcaagaatgggtgattcaaaaactagatcccgttcttcttttaagatctgcttgatcagtgccaccaaatcaggcttttcagcagctggataggtggtatacacatatttgtatttgttccaaaagtaacgcgcttcatttgcccgcagaccggctaatttttctgcaacaggagagctctctaatccatccgtcactacatttttaaaatccacttcgtaagccatttcttttctccttacgtttatttgatcaatcaccaatactagctaaataatgattatttgatggcttgattataacactaaagaggaatgacaggtcactagctagcttaaggaaatggtttagccagtactagttggtacaggcaactggatagtcagtcattattgttttggaggacaaagaactagttgtcattgtttgtcgaatagtaggagggatgctatgcttaatctagaaagatttttgatcaatcatctatcgatataagtttagctaaaaaaattcccttcaatctctgaagagaaaaccaataacaaagggctatgacctaagtaaacatccaacgaaatgatctgagttggaggagcggtcgaatacttttcataaagctgtgatcagaatctatgagatcacagaagcctgtctcttagtattcagatcttccgtttattaaaatacttacagtcatcccttttctgaaaaggagaatctctatgaaagtcttatttattggtgcatatggcaaagtcggtcagcatttcgccgagcaactgaagaatcatccacagatcaaggaaaaagccttgatccgaaatcctgaacaagttcctttctttgaagagaaagggatcgagacggtactactggatttggcttccagctcgattgaaacgatcgcagaagcagcaaacgaagttgacgctattgttttcagtgctggtgccggcggcaaaggactagaaaaaacgatagcagtcgatctagatggtgccgtcaaagccatggaagcggcaaagaaagcgggcgtcaaacgtttcgtcatggtcagcactttcagaaatgatcgggaagaactgttgaaacaaaatagtttgcagccttacacgatcgccaaatattatgcggatgaatggttgagaagccgcaccaacttggactggaccatcgtccatcccggcggtttgacagacgatccgggaacaggcaacgtcaaagcaggcaaacgcaatgagttcggctcgattccgcgggcagatgttgctgccacattgatcgctgttttggaaaatgaaaacagtattggcaaagaatttgaagtcatcagcggagaaacaccaattgctgaggccattcacgaattataaaaccatctgatgaaatagtcccctttcgttaacaagcagtccctgccactatgttgtctctcaagcgacaacatagtggcagggacttttagggcgaaatgcaggctgtgccttctccaaacagcatgcttatcttgtacctttaatcattgctaacgcttgcgaaacaccatcttcgtcatttgaaacggtcacatgatctgctaattctttgattgctggatgaccgtttgccatggcaaaacttatatccgcgttcttaaacatttctaagtcatttaaactatctccaatagcgaattttgttggctggtctaattcataaatgcggctaagatgatcaaaaacaaagcccttggatacggagcgaggaacgatttcaagattgacggccgctgattcagtaacagagacatttggtatattttctatctgcggaaatagctctttttttatctcacgattagggacgaaaacaaacagtttataaacattaatatttttttgattgatgatttcttcaatcgcatcgtaagctgtcgactgaatggtattttcataatcaagttcataattcagttcttctacaggaaattcttgaccaatcgcatagaaaatgtttttcatctcttcttgatagttttgcgattcatagctgccttgattggtatatatttttgttggaaacgctgaaacgatctggctcacttcttttacagcttggggatcaaatggaaaatcaaaaatcagcttgtcttgatcgtacccaatggcaccattcaatccgaccgccgggatcgctaaatcagcttctttgaggatcgcctgaatatctcctacttctcgacccgaacaaataaagggaatcaatcactggaaagcgactttaaagaagcggcatttttatgactgatcttttgctccgagtttagtagtgttccatccaaatcaattcctattaaattcatgatatacgctcctatattgtttttctttattatacgttttaacttaggagttgaccaatacctttcgcacataggttgttatctctacaacagcgaatttattcatatgccttgacttcgctcaaacaaatgtcctaatagttagagcattgctctaactagccagttcaaaaaaagaggagaatgaactaaaacgatggatatcatcaagatattgattatgaaagactcttgtaaccgatgactttaatcagtatcctgctggaaatctatttttgcgctatctgcgatttttatccagatagacctctttaataagcaatatgatttagtgccttaattacttttattcaggccattgtcagcatctgctaattcatataccatcacgactgtcgaacaacgctcaccgacttgattcacccaatgatctttcaaaaaaccgctttgtttgaaccctactttttcgtataatttcagtgccggctcatttgtagaattgacagtgatttcgattcgattaaagcgattttgggcagcaatcctttgcatgcctttttctaaagccgctttcccatagccttgcctttgccttgacagttcaccaatctttatatcaaacgttgctcctttagcttcgataggcttgtaggcaaattctccaatgaggtggcctttttcgtctataatcaataaaaactcaccagaaacctcctcgtagtaatgaagcgattgctgtacttcctcaatgctcactgctaacccttgagggaaaccgaccgctgccatcacctttccgtcttgccaccatttctggatcagtgggctatcatctattgttgcttttcttaatgaaattgccaattcttttctcctttatttttatcagttgtctctctcacgagggcacatccaagaagaacctcgttcgattatttcagatacttttgcagagcattctcacttcttctatgacctcaatagaaagtctatttaataaattggtttgcctattaatcaatagtatggcataaaaataagcagcagtaaacgctacctgaatttctaaactttttctataaaaaaacagcagccactggatcttgtctgcccctttggttgctgtttttttaaattgttgtcttcagttgtgtttttttacagtatatatagtgttaaaccctgtttcacaaccagttaatctgccttttctaaccactttcgtgatttttcaacctcttgataggtcagttgatgacttggggtccaaacatattctatttgtgcacctcgagactcaaaaatcgcttgcacatacttgctgtcttccacagaaacgatagggtccttcagacccaaactcataaatacgtttgtttgtgccagtaggtgattgggtaatttcgatactggatacattggatggtacaaaatcgctttttgaaaaagagcactgaattccagcaatagattgagcgcaatattggctccattagagtaaccaaccaagacaacttgttcgattgagaaacctttttctttagcgacttcttgaatgaatgctgccagttcttgcccccggaacattaaatcttcttcatcatagatgccttctgctaatcgtttgaaatagcggggcatgccattctctaaaacattgcctcgaatacctagcaatgatgcttggggatctaggtcgtgacctagatcaagcaaagagcgttcatcgccgccggttccatgtaacaagacaagtacgggagcagctggttttccttggtgaaagataaagttcatttgtcctccttctcgtttggtcgtgccaaatcgaagatctcgccgatctcagcatacgaatttcccgcaagtcggctaactgccgccaattttttgggattgatttttccttcttcatagacctgttcatttatttgatacccagtgattttaagtaagagcagatccacttttatctcttctttgtttttttccttggtttcttcctcgttaatcggtacatgttggtaaagggtggtttcaaagcgaattttcgcctcttgcaatccgggtacgccaaccgtttgagaagggactggcgtaaaatttgcgacggtcaattcactttgttctgcaggtaacagtgccgctgcctgattggctgcttccacattgctgcgatccaagatatggatcactgcttccttggtcgtgagtaagttacgagccgtatctttcatcgtgcccttttttcgctgaacagcgatcgaaacgatggcgggttctgaactgacgatcgaaaagaaactgaagggggcaatgtttacggtcccttctgccgatcgtgtcgttacgatggcaaccggccgcggaatgatcgagccgatcaataatttataattttctctttgcgtcagattttggggatccaaataaatcatgcaacaccgctttctcttttttgtgtatgattgatgacttcctacttgtaaattaaacagtcaatttgggtaaatgagctgtgatttctccgcggcgctcttcaaagtgagggggcaatttgagtgctgtccccagggtttccaatggttcatcgatgagaaatcccggagattccgttgcaatctcaaaaaggatcgtaccaggctctttaaaatagacggctttgaagtagttacgatctttgatttctgtaacaccatacccttttgtataaaggtcatcttgccagttgatttggctttcctcattcggtaccgaccaggcaatatgatggacggtaccgacaccccaacgaccaggtctcagtggctctgttggtaggagaatctcgtgtttcactggtccggcagtcaccaatcgtcggtttgattctgtctccgctacaacttgcagccctagatcatgggtcaacgtcttgaatgtttcctctggcttagcggaaagtaagaccgctccatggaacccaagaatcgcgtttgtttccgctgcttccccttccactagcgctaaagacagttcatgaggatcttgaagttccaatgttggttgcccaaatagatggctctcatgaacagtgacttgatgatgggccaattgttgtttccaatagtcgctgctgcctttaggaatgcgaaaggtaatcgtgcccacctgtccgctaccgacacgaccaggatgcgcgttggcccatgggaaaaaggtaatgatcgtgccattttcaatggacagattgctgtagtagagatgatacgtataaggatcatcaaagttgacggtttgtttgactaaacgcaagcctaatacttcgcggtagaagtctacattttcttgcgggtcaccgacgattgcggatatatggtggatttgttgaatgggttgcatcatttttacctccttagttatggctgcgagtggtatcaaacggcttgatcgctttttcgatcattgcacgttggtcttccaaaaacggagccagtgataatttttctcccaatgtttcgtaaggctcgtcacccatgaagccaggttcatctgtcgctaattcaaaaagaatatgtcctacacgtacatacagcgattcaaaatagtagcggtccacatagccggaattcgcgagacccaaattttcaaaaacttcttgccatacggctaaagattggcgatcggctaaacgaaaggcgacgtgatgcacttccccgtctccttgttgtacttgtgggcttgtggtatcttcgactaagacgatttctgccccattgcccccctcgccaacttctaatagcgtgcgatttccttcttgatcgatggctttgaatccaaagacattttccagtaatcccttgaaatcggcaaaataagaaacggagatttcgactgggcctaaaccataaatagcgaattcttctggaactggcccttgtttccatggaatacctgctttgacgccttgattgtgttcatcagaaatcaattggtaagattgctgatcaaaatcccagaagcgcaacacttttttgccaaattctgttgtgatcgcttcatgtttcacatcaaatgtctcaaaacgctttttataatagtctaatgcagcatcggatggtacgcgaaagcctgtacgggtaattgaatttgttcctttactgccacgatcggtattgggaaaatcaaagaatgtcatcgtggttcctggggaacctagatcatccgcaaaatatgtgtggtaggtataaatatcatcttgattgacggttttcttcactaaacgcatccccaaaatctctgtaaagaagtgatagtttctttcgacatcactggtcatggctgttacatggtgtacccctagtaattggtcttgttttctcattttttcttcctcatttctcgttataagttatttttcgtaataatgtttttaatgtttgcaactcgtcaatactaagcgaggcaaaaattgccgcaatttttgtggcatgagttggaaagatctgatccatcaattctgcccctttatctgtcagactgacataggtgattcgctgatccgtttgacttgtttctcgacgaacgcagcctttttttacgagttgatcgatgacgtacgtcatgctgctgctggcaatcaagattttttctttgatggcttgggtggtgtgtgtacctttatgataaagcagttccagaacggaaaactctgtcagattcaagccataacagcggacatcttgtttagccacctgctctaagtgactgctgctgcgtaataaaccaatatagaccttcaatgcttcctcttgatgatccatttcctcacctcgctcgatttatttcgaattcgagataataataacttactttttgtaagtcgtaaaacaatctgctttccttctgaaacaagctttgtcaacgtacaacaaaaacccccttaccattagaatccttttaagcaaaaaggatctaatggtaagagggggattgacttctatttgtagcaggtgtttattgtccaatctactaggaactacttcattaagatatagagaaaaatcaaattccgctggttagtatgaaagcagcgaggcagcctctttatcaacgatcaatgtcatatctggatgggtcgtcaatagcgttgccggaacgtcctccattactgttccatctactaattgtttgacgatgcctgcttttttcttgccattggcgatcattaccaatttcttcacctgcatgatgctttttggtcccattgttacatagaaatcaggttgtttttctttgtctccaccaacctcacttaacaaaacgtcagccatctcgggtgtcgcattcgcattcacgcgactcgttaaatctccaaattttgtcgtgttcggtaaattcccacagaaatggccatctgatccaacccccagcaacaccatatccaatccaccatcggctttgattcgttcatcttgtgtttcataattcgtccagtccaagacatggattctttcacgatcgatttccgctggtccaaaaaacaggttgtgcaagttcgtcatcgtgacaccatagcggtcttcttcccctttgaatggaatctcatcaaagttataaaagtgaacgtgctcaaaatattttttattttttactagtggtaccagcatttcatacaccccttttggtgttgatccagcggtgattgaaatattctttcgattctggctgtgcattacgcctaaaaggtgctgtacggctacttggctcatctcttgataatcttccgtgatgataactttcatgtgtcttccctctttctcattcgtttcgtggacagcggcccttaatggaattaccttctcaaaaaaagccctttcactttctattgtataggaaaaacaggccaaattgttcgacttatctgaaatttatttttgcattctatggcgcacatctttttgatccatccgagaactacaattcttccccttgggcgaatgtacagctgcaggaaatctattcaatactaaaaaagcatctgatacagagtgaagtcggaaatcagcaatgaaatctgcacttttctcctatttacttcctaaccttctaatctgtatttcagatactttttttcagaaaataatccatcagtgaagaatcaaatgcaacgcaaaatctacctaactatagtaaaaaatcattccgcttcttcgatatcccggacaattttttccacgtcgatttcccgctgcaagaactcagcattctcaatgggaaaatgttgacgaaactcggctacttccattacttctgcttcaccactgattaagctaaaatccagtacatgaccagcaaactgatgatcgtcactaataaagtgcagatggaagcctgctgctgcagcaccatggaaaagtttcggggtaaagaagcctacgatagttcctgctatttctgtcgccgtaaattcaggttgattttgaatgatttcaacgaattttggatagggcttttcttgtttaggcgctacccgcacgtgcatcgtatcaaacattccatgaagcttgatggccgcaaacaaattgggactgatggtcgctaatagtcttcccttgacttcttcatctgtagcttctgtgtcaaaagcaagttcatccgtggcttcaaaatcaacgacagctgcatacggcgtcgtctcggtccctgtcagctgcttcacctgtcctgtttcgtcaacatgataaatcacaccctccaagaaaataatctcaccatttgaaccagctaatgtaccgattcctgtatcaccataggctaacatcttgccgatttgttcggtaccatccatcaaatcttccatcaacccgcctaaagttccgtgttgatataaataacttttgcttttcacgttcatcatgaagctccttctattagtaaaataaatactcttagtaaaattgatccggcaaaatcgtcttgcctaattcggcattatcggaataatcgaccgggatatcaatgacgactggtccatcagttgcaaacccttcttcgatcgcggctgtcaattcttgttttgttgtggcacgtaatccttttgccccaaaggcttccgcgtatttgacaaagtctacaggaccaaattgaacacctgaagcacgatcatatttcatttcttcctgaaatttcaccatattgtaggtgccatcattccagataagatgaatgatgttctgttttaagcgaacagccgtttctaattcttgtgaagagaataagaaaccaccatcaccagatacggaaataatttgcgtattcggccgcactaatgctgccgcaattccccatggcaatgccacacctaatgtctgcatcccattactaaacaatagatggcgaggttcataactgcggaaatgacgcgccatccaaatgtagtgactgccgacatcaacagtcacggtcatctcatccgtcactttttgctgcaatgtatcaatgatctccaatggatgcaatgtttgttctgttccacgggcctctatttgcttttcggttaatttttcttgcaacgtagctaaatagttctgtgcatctgctgataacgtatattgatcgatggcttgtgtcacttgctcaatgattttggcaatgctgcctaacagctctacttcaggctgcatgtatggatcgatttccatcggtacttcatcaatcacaataatccgtgcgtctttctctgcattccaattgcgcgcttcatattcaatcggatcataccccacagcgatcactaaatcacttcgttttagcagcatgtctcctggctgattacggaacaagcccacacggccaaagaaatggtcttccaaagcacgagaaatgattcctgctccttgaaaagtttccacgactggtaatcccgttttcgctatcaaatgacgaatggcttccgtctcgctttcagcagaagcccgcatgcctagtaataaaaccggtagttttgcttccttgatgcgttcaacgagatcctcgatatcctctggattcgcttgtcctaattttggcgctgataatggcttgatggcacttccttcgacttggccatccgttacatcttgtggtatcgacagaaaactggcacctttttttgcggttttagcgattcgaaatgcatttgcgatattttcagataatgtttcgggatcttggatctccgtgctgtatttggttattggactaaagagagcagcgttgttcatactttgatgggtcagtttcgataaatcagaacgtttcacttgcccagccaatgccagaactggatctccttcagctgtcgctgtcactaatcccgttgctaaattactggcacctggaccactggtagcaatgactactcctggctctccagtcaaacggccaatggcttgtgccataaatgcagcattctgttcatgccgggctaagatcaattgtggtccatggtcttctaatgtatcgaagacaccatcgatttttgctcctggaatcccaaaaatataggggacgtgatgattttctaaactttcaacaataatttctgaaccttttttactcactgtactacctcttttcaaaatctgtattaatctcacgactaataatagcacttttcttttatttatcaagaataatacactattttcatctgtattaaaaaaatagcaattaaaaggaaccgttttctagcgctccctaaaaaggattctataaataagaacgattcgtaaaaacaaattgttattatctagttttattttcttatttttttcatgtttttaatataaatcatgttataataaagacatcaaaaagtgaaaggaactagaaaagttatgggtatgtggattagtttggtcagtttcttagcagtaattgtaagcggtattttgttgattatcgctgccatcaagaagcgaccgaaaaaaagattgggatttattttatgcggaagcgttattctattttttgctggtgcaattttatctccgagcaatttgacactatctgttatttcacctgaaatacaaacggatgaaacaggaaaagcgactatcgaaggggaagccacggccgatgctgtcctaacgatcaatggggaaacggtcaaaaacagtaaaggttcttttagctacacagttcacctgaatgatgccactgagcaacaagttgtggtaaaagctgccttaaatgatcagaaaaaagaacaggaagtcttgatcaaaccttccaaagaatttgtggcttatttagaagcagaaaaagcggagaaagaactgattaaacaggtcgaaactgcactagcgttggcagaatctaaaccaacacaaaaaaattatgatgaagcagcaacattggttcattctctcagcaaaacatatgacgattatgatcaacgtttggccgtcctccaagatcatctgcagatcgccagcgcgttagaaaaagcggaacaaagtctaagcagaacagaccttgaggcagctgccaagcttgttgcagcaacaagttcgacgaaaactgaatttgaagatcgactggcttctttacaaacaaaagttgaagagaaagaaacacaagcgaaattgcaagcacaagcgaccaaagctgttgaaaaagccgaagcagagccgactgaagcaaacttagctagtgcaacttctgcgattgccaagcttccctcagcagatgatggattgacgcagcgagctgaagctgttcgccaatcgattcgtgaagaacaagaacggcagcttgctaaagccgaacaagaacggcaagcagccgccgctgcgaaacagcaggcaaaccaagccagccagtcaaatcaaaccacaagcaatcaagcagaagaatatgtcatgatcacccgtacagggaagaagtatcacacccataaatgcggcaatggtacttatttcccagctacgttgtccgaagctttaagcaaaggattgaccccctgcgagaagtgttactgatttttttgaatatggaacagaatctagacagcgttcttcctttctaatcaaagaaaagaacgctgtttttggcgaacaaatatgcgggtcataccattcttcctaaaatatctagcaggaccgagatacgtcgaagcttgtttggtcgtagaaaaaaacgtcaaggctagtatgctcctagcattgacgttcatcgtattttctgtagattatacctgttagatagaaataacacgctggttgcttgtcaaaaggacttagaaagataaagcacaagatcgtcattattgtaacaagcagcacccattgccaagacttgattctcaaaccagacccctgatccgtcaggtaagtagccattttttaaatacagtcgctgtgcagtgccataaccagaatgaagccccacaccaatggtgatcacagacgaaaatgttttggcttgttcttctgcagcttggagcagcttagcgccgattccttgccgctgaaagttttgaaagacatttagatcggtgatctccggatagccattctttttaaaaggaccggcttttgcgtggggaatcaatgtcgcatagcctgcaatctgtcccgagtcttccgcgacaaagacctgtcgcagtccgcggctctgttcttgaagatatctctctaatgtagcttgacgactaggccattgttgtgcaagaaacgcttgatcgattgatcgacaatcactagctgtcattgggcgaataatcaaattgatccctccataaatttcattgtctcattgattataacgcatttcggctcaagcgttcgacttttcccatgtccttgcagaatactgctgccccagttgccactagcagttgctttattcacccatcaacataagatggcaggttcgattcctaactcggttttggtcaaaatccacgaaataaatataccctacagaaccaatttcaagctttccttcatgtaaaataaaactttcactcgccccgaaaaacgaagaacggatatgggcatcgccatttaaaatcgttgctggatctgtcggatagttaggatcatctaggctcatcagaaattccaaatgtttcggtccagggtaacgataatttgtattttccgagagttctctaggcactagtttatccaaaatgcgattcagatcaacttgtaaaaattcatccccattaaaatccgtatcatgcatgaattcctcgaaaatgacggaacaagttgtgtgtggggattggactaaacagatgccgtttttgatttggcttctctctacaaagtccttcacttcttgcgtaatattatgataagatacccgattgccatttgatgtcaatgttagctgttctttcgcgaatttcatcttttaatcccctcatctcttagctcagcaacttttttgatcatttctgtcaaaacgttctgcggatctggcgcgcagacgataccactggtgccacccgttccgtcggctcctgattgcagtgcttttgccacatcgtctgcggtcgaaataccagccgcttgtaaaatcttgatttctttgttgatggcacggatggcttgattggtttcttccatataagaaacgtcactcgtttgaccggtaccaatcaattcagttggttcacaaaccataatgtcaggctgcagagctgccactgctttagcttcttgcagtgaattcgcgcaagcaatcgtgatgagccccaactcatctgcccgattaatcgcttttgcgagttcatctaatgtcattgggtgttctgcatgattgagaaatgtcgctgctacgccgacatttgctactgattcaggtaagacgtagcccattccccgtccaacagtcatgccatcgatgtgttgaaccgtaatgaacaaatgattcgtagcttgtttgatcgttgcggcatctgcgtgctgcaccgtgaacaagatatcaacgtcatatttttccgctaattgatcggcggcttttgccagtgccaaggattcttttccgtataaataggctttgggattgactacaaaaaagggtgctcgtaactgctttttcctcatgcttatcctcctaacaagtttttgtatgaaaaacgtgatagtaatgtgctagcgtatctgccattccttgattcgctgctttctttagttcaaagtagtcagcaggctgctgttcttgaatcttggtcattgcggctgtaacgaaatctgtaaagatgttgatttttcggatcccgccttgtgcacatttttcaagattttcatcaccagaagaagaaccgccatgtaagactaacggaatagtaatggcttgatggatctcacttagtacatcaaagttgattttaggcgttcctcggtaatgcccatgggctgtgccgatcgaaacggctaacgaatcaacattcgtttgttcagcaaatcttactgcttcatggaagtcggtataaatcgaatcagaaagccccgttgcttccaaactgccgccagagccgacatgcccaatttctgcctctacgaccaccccatattgatgggcataatcggcgatcgctttggagcggcggatattttcttcaagcgggtcttctgacgcatcgatcatgacagaagtgaagcctaaacgaatcgcttccttgatgacttcctcatcttgaccatgatccaaatgcaacgctacggggaaggcgcttttttcagccaaatacttcccaatcagggctgcttcttccaaactcagcatatccatatgtgattgggcaaaagccaagatcaatggacaccctagcctagcagccgtttcaacataggtgcgggcactgtctagatcaaaaaagttggctgcgggaatggcatagttgaattcctctgcatggtcaaacatttcttttgtggtaacaagcattttgcaagactcctttattctctgattttcttttcgatttctgcatacatttcttcggtaccgatccctgtcaataaaggcaatcccatgatgactttgtctttgatggaatcagggactaccgtggtactcacaacaatgtcgtaatcgtcgatcttgttcatttcatccgcgactttggattgatacaatttgacttcattcgtcagttctttttcttttagccattctttgactttattggttacgatcgttgatgtcgctactccggttccacacatgatcaataattttttcattgttcttcctcctacatgacgctttgttttttaggtaacaccttgttaacatagatcaaaccgatgacaacaatcgcaccgatgatcgctaatccgccccagctcaatacttttgtcaaaccgacataaagccaggtagtccatagtccgccttcagctagagctgtgatcgttgaatttccttgtaagtcaaaattggcagacttagcagctgttgttactaatggtgcgacccaagaagtgatatacaaaatactggtcatataaattgtccctgcgataaccgtccggataatatttccgccaaatactgctgccatcaaacagacaagaaacggaatcgttgctaaatctccaaaaggcaatgtcgtatttcctggcaaaacaaccgctaaaagtatcgtaattggtacgagtaataatgacgaagacaatactgctggatgtccgacagaaagcgccgcatccatcccaatgtaaagctctcttccagggaaacgtttcttcacaaagtcattggcagactcagatataggtgtaagcccttccattaatagagcaaccatttttggcataatgaccatcactgcgccggttttaactgctaattggccagtgcctgccacatcatagccagcgagaattccgatgatcaaaccaatcagaaagcccataactgtcgagtccccaaagacaccaaaacgtttttgaatcgattccgggtcagctttccagtctcgcaatcccggaatacgatcgaataaccagttcatcggtaaagcgaaaacaaatcctggagcagcggtcccgtgtgggaaagtgatattcgggaaaccatagaatttattaatgatcggtcctaaaatatctcccatcaaaagaatcatcattagatagatgacggttgcagcgatccccatggcaaagttgccagtcaaagcatagaccaacgaagaaatgaacgccgcatgccaaatattccagatatcgacattcaatgttttcgtcaggccaaaaataatcaaaacaacatttaacacaacaccgatcggaattgccagacttcctagaatcgtcccataggaaatcgcagctgctgccggccagccaacatcaatcgtcgtcagattcaagccaaatcgctcaaccatctgttgcgctgctggtcctaagctattgcttaacaggtcgatcactagattcaagcccacaaaaccgacaccaactgttaaagcagatgtgaaagccttgcctggtttcgttcccagaataagaccaaaaataaatatcaaaatcgggagtacaacgattgaccctaaatcaacaaaccactgtaacgcatttaacatgatattccctccttattccaatccatactgttgcaaaatcatccgatattcctcaacatcatggatgtctcttaacttttccaacacaccatttttttgaaacatttcgatcaagttttgcagcatttgtaattgttcgtgcggctcctttaatgccaacataaagattaatgaaactgaaatttctttgtcccttgttcccatttcaatgaatggcaatggatctgtcaatgaaagaaagccaacttgcgatctcttgacatactgactatctgtatgaggaatcgccacgccaatcccattgatcatcagaccggttggaaaaaccgcctctcttttaatcacgttgtcaagatacgcctctgtcacacattcattctttaaaaattcctctgtaagtagccgaaatgctgcttctttagattctacttctttgtttaataaagcaatttgctggtcaaaaaacattcggggtccctccttttacaagtttacgataaagttcttctcgatttttactgctaaccacccatcgtatttcttcaggagagttgaataaatcgtaaatagatgcaatcaattcttttgcttctgacatatttttttcagcgattgccaagagaacgactaattgaacttccgtatctccccattttatggctttaggtagtgtaacaaatgctagttttgttgttttgacagtctgcggatcggcatgcggaatcgctacgcctgtctttaatccggtactgcctaattcttctcgtgcataaagtgactgcttaaaatcgttggtgactaaatgatggctcaaataactctctgcaagaaaatctaagacgtcttttttggtgttaaacggttggttaatgtacaaaaatgccggatctagatatttctgcaatagctctgatgattggtatttggatgaatgcagtttcttttcattttcattcaggtttgaaagatttgccgaaatcatggcaatttcttcagttgtcggtaatggtgaaacatagagaacagggggtgacacttcctccaacggaacagttgaaatgatcagatccactaattctagtgatgtactggctaatttctctgcactgatgatctctaaaactgtcgtagcagaaatcgtttgtttgatccggttaaagatcagctcagaagtggctaatccagagctgcaaacgatcagcacatgctttgtgactttgattttttcaaaagcgagttgaaaatgaatcgttagaaatgacacttcatcttctgtcaagaagagtgcaaagtttttttctagtccgccaatcgcatatttcgttaatgtaaacatggtcgagtattgcttcttgatcaatcgcaacaaaggatttttgactaacatgccatttttcagacgatggatcatagggacaatatgcgaaagcagtgcttgcaacaataagttatcttgtgtcaaatcagtatctagcaaacgggacatcttctcgatcatttcttccgttgtttcgatcacgttggcttctcttttttccgtaatctgcatatacggctcaattccatgagctaaaagcaatgaacaaatgtattggatatctgtctctgctagggaaacagctagttcactttcaatccgttctgcaaaggaaacagcaaccatatacagtttcatctgttttaatttctcaaatcccaaattctcttgctgttccaaatgtcttcctagacaaatccgtgaaagaaaaatttccaacgataccgtcaaggattccacaaaataactattgagttggcgaccaagtgttaaggatatttctgaaatcagtgctgtagtcaaggtaacgatcttcggatcaaacaatgtctgaatggcagagtgatccaatcttgcagaatctgtatgtttttcaagaaaagatttgaaagttgcttgttgaacagattcttcctcctctagcttcaacccttttgcagacattgacgcacgaacttttttcttctgacaaaaagcgaataattcatctacatcttttttgatcgactgataactaacgtagaaatattctgcaaatccttggtaatgcattggctttttcgagaagaaataatttgcaaagataaacaatttacgatattcaggagaatattcgtcaacgattttaccttcagtaacgatgagtttgtagcctttttcccttgcagtgggattcccttcaagcttgacccctcttctaggcaaacgagcaatggtcaacccgtaaggcttgattttttcttccagactcgccaaatctgtatagactgtttttaaagaaacatagagctgttcttgaaaaaaagcggctggtctgaactctttttgtgtcagcagcaattgcaacaacactttctctcttttactcaaatccatttgaccacctccaggaagcgcttccttaactatatattagggaatcagcgcataatagtaaataatatctgattaccacattaatctggtaattgtatcacatagtgaccattccaccactacacaaacagcttttcaatctggagggattcttgtatgctaagtaaaacaatgaatgatagaaaggatgaaccaaatggagcacacaaacgattcattagaccgaggaccttttttccacggaacaaaagcatcattacaattaggcgaattactggaaccaaaaaaagaatccaactttgaagccggtcggatctcaaactacatttacttcaccacaacattggatgcagccaaatggggagccgaattagccaaaggaactgggcaagaaagaatttatttggttgaaccgactgggccttttgaaaatgacccgaacttgaccgataagcgattccctggtaatccgacccgttcctaccgttctgcctctccgctgaaagtcgtcgcagaattaggggcatgggaacggcattcggaagaagtgattcaacagatgttatcccacctgcagcaactaacagaagatggaaaagccgaaatcattgattgacagttttcttagcacgcaaacgccacccttgtttctggccgtcgaaaagaaaaatattccaacaagtgccatgctacaatgcagaaaagacactgattaaaagaagaaagtaggaataacgatgtatgtaggatttgatattggcggcacaacgatcaaatacggggttcttgatgaaacaggagcaattctggaaaaaaatatgcttccgacaaactacgatccccagtctttctatcaaaatttaatcacaattattaatgaagctaaaagtcgctatccgatcgccgggattgggatcagtgcgccgggcatcgtgcaaaaagacggtttgatgctgacagctggcgccatcaaaccattgtacggcgagaatttcaaaaccacattagaagaatgctgtggtttaacagtttctgtcgagaatgatgccaatgcagccgccatcgcagagaaatggatcggcaatgcccaatccttctccaattacctttgcctcgtcttaggaactggtgtaggcggagggatcgtaatcaatgatcaagtgtatcgcggtgcccacggcatggcaggagaatttggctggatggtgatcgacgccttgccttctacaggtaatagtgaggaagtttcgatcaatcgtaaagctgctgtcgttgatgggctcgttcggatctacaatcaaaaaggcggtcagctggcaggatttcaagcgacgacagatgctcgagaaatttttcagcgcgcacagatgggagaaacattagcagaaacagtgacccaacagttcctgacagatttgtccgtcgggttgatcaatttgatcagctgtttcgatccagaagccattctgattggcggtggtatcagtgccaacccatatttctttgaacgactgcaacagacattaacaactgtcgaaacacaacacgctgccatcaactatttgcggggaaaaacgattgctcctgtgctgcctgccaaattgcaaaatgacgccggattaattggtgcagtttatcagattcatcagcaactcactcgctaaatcatggtatactcgtcatatactcttatgggatagcgaggaacatttatggccgtttttcagcatttgaacttaaacaaattgtcttcagtcgaacaagagatctatcgctttattgtcaataatttagaaaaaatcccttatatgcgagtacgggatattgcagatgatgcccatgtttcttccacttctgtctttcgttttgttcaaaaagtgggattcgattcctttcctgaatttcgcttttatatcaagacccatttagaaaaagtccattatgaagaacatcaaaaacagttatcccttgaagaacgcatccgtggattgaacatgacgattttccatcccgatgtcgaataccaaatcaagaagatggcgcaaacactgcgagatgcggactgtattttatttatggggatgggggcgtctggcgcaattgcacagtatgtcgcccgcaagctcgcaaatatcggctacttctgcatcagcatcgatgaattgacttacccgatccgcagcttcttacgagccgatcaaaaaaacgttctggttttcttgagtgtttctggtgaaacaaaagaattgatcgaagtcattactggattagctaataaagcgattgcccaaaaatattgtattacgagaaataaagagagttctcttgcccatttatgtgactactcgatcgaatacgcagtcaaagaagagcgcaaagacatcttcctcgatctgactagccagcttccagccatcgccatcgtggaaacactgattggttatttacaagatgaacctacccctcaatgatgaacgagcacagaaagtaccagacaacgaagaacgccctagccagaacactcgctttacagcagcagttttctgactagtggctgcaatcaagcgtttgtcttgctgctttctgttttttgtaaccacttgttccgactgtggaataaatttcttcctcacagaatttgattctaaaaacgaatgcgcttactttttcaggcaacctttcgctataataagtccatcaaatagagaaaggtgttactgttatgcaaaaatttaatgatctactagaccggtccttggtaccaattgccaccagattgaataaccagcgacacgtcgcagcgattcgtgatgcatttatgttgattttcccgttgacgatttcttcttcattagttattttggtcaacaatatcttattttccaacgatagttttatcgtgcaattatttcaactctcaaaaatctttcccaatttagaaagtgcccagcaagtactggcatctgttgctaacggaaccatcaatatcatgagcgtattcattgcttatctggttgcccaactgctagcaaaacactttgatgcagatgcgacactagttggtttgacaagtgtagctgcgtttatgattttatatccgacttctttctcagttgacggtgtcaatgccatctccacccaatatttaggcgcacaaggcttattcgtcgccatgatcgttgcttgtctggtaggagaattcttgccgaaactattcaaagtcaaacgattacagatcaaaatgcccgatatggtaccgccggcagtttcccgttcgttttctggaatgattcctatcgtgatcatcgtagcagttaccgcattgatcaatttcctagtactgatgattgcgccagagggcatcaatgaattgatctacaaagggatccaaagtccgttgcgtgatttaggaggaaatgtcgttggtgtcttgattttagctttcttacaaacactgctcttctccatcgggattcacggaccaaatacattgaatgccgttcgttcagcaatttttacagaacaagatttagccaacttggatttcatcaatcaaggcggttccttgtgggatgtaccttacaaagaaacgtggggcgttttgaacgacatgtttgctaatatgggcggaacgggaatgacgttagggctgatcattgccattttcatcgcctcgaagcgaccagaacaacgggagatcgctaagatgtcacttgttccaggaatctttcagatcaacgaaccgattatcttcgggttaccgatcgtcttgaatccgattatgatcattccctttatattgactccaatggtcaatattctagttggttattttgtaacagtcatttggccgatcatgccgacaccagcaatcggtgtgccttggaccacaccgggaatcatcaacttgttcctaggaactggcggaaatgcagtagctgcaatcgttggtgtggtctgtctggcgatttccgtattgatctacttgccattcgtgattgcttcaaaccgttcacaaaaaatcgaagcgtaacttttttaggaggaaagaattatgagcagcaaaatgccaaaagattttctatggggtggcgcaattgctgcccatcaagcagaaggggcttggaatgtcgcaggacgcggcatgagtattgctgatgtgatgactgctggaggaaacgggattcctcgtgaaatcacgagaggcatcaaagaagatgtgtattatcctaatcacgaagcgatcgacttttatcaccgctacaaagaagatattcaattattcaaagcgttaggcttaaagtgtctgcgtacatcgatctcctggagccgtatttttccaaccggccaagaggacgagcccaatgaagcaggcctgcaatattatgatgacctttttgacgaactattaaacaatgggatcgaaccaatcattacactgtctcattttgaaatgccttatgcgatttatgaaacctacggtggctttgtcaataaagccgtgattcccctcttcgttaaattcgcaacctgcgtttttgaacgctacaaagataaagtcacctactggatgacattcaatgaaatcaataatcaagcagacggacaggaaccattacatgtctggacaaactccgccatgatcatcgaagaagaaagcaagaaagaagaactggtctttcaagcgggtgtcaacgaactgatcgctagtgcggcggcagtcattgaggggaaaaaaatcaatccagactttcaaatcggctgtatgatggcttatgtcccaatctatccttattcctgtgcaccagaagatttgatggcttcggtcaaagccaatgaacgtcgttacttctatagtgacatccacgtcagaggaaagattccgacctatgcacaaacttactggcagcaaaaagggatcaaaatccaaatcagtgaggaagagaaggctttactaaaggcagggactgttgattatattggtttcagctattatatgtcaggaacgatcacgacattggaaactgtcgaaggccaaccgaccgacgatatccctcacgcaaaaatcgtccgtaatccctatatcaccgcgacggattggggatggccaattgatcccgtaggacttcgctatgttttaaacacgatctatcaacgttatgacttgccgctctttatcgtagagaatggctttggtgcctatgatcaattaacagaagaaaacacgatccatgatccctaccgtatctcttatttacgtcagcacatcgaacaactggagaaagcagtaatagaagatggtgtacccgtcttaggttatactccttggggaatcatcgatatcgtcagtttcggcagcggagaaatggagaaacgctacggcatgatctatgttgataaagacaatgctggcaacggaagtctgcaacgcttgaaaaaagattcctttgcttggtatcaacgggtcatcgctacgaacggtgaagaactttaacagaagtcttgctactatcccaaaagtaaaagcgactacctaaaagactgttctttcaggtggtcgctttattaaggtttcttatttgatttcctctatactagaagtgattacccagtcatccatgttcttccctcgttgatacgtaaaaggttcaatcgcttccagttcagcaattcgataaatggccaaaaatttctttcctgcccaacgctccatttgttttttggataaatttaattctgattggtgctgctcaacaaattgttgtgattcttcaggtgtcattttctccgtttcaatcacgttctcaatcgtgccacgatgagtaactaaaagatcgccacctgtttccacgaagtagacacggtcgccaacttttgcgcgtccacctaacggagatttgcgccctgctgccccacggatgatggcgttcttttctcccgccaacaatttctgcagctctttgccttctttgtttagatagactagatgctccgctactccttctttgccttcaacccaagaactcaccatttccttttcaccttttttcgattatcatagcagaagaaagcggtttagactacaaatttttcatgtcattttaatcagctagttccccttacaaatgacgaaaaatgcgaatatatcagcaattcaacgaatcgttgcgttctttatttcctgattcaacgattcatttcttgcacctatcaatcaaaggaggctactctgatggtagagattggagaaaatatcaaaaagttgcgcaaagcaaaaaggatgacccaaaaagaggtggctaatcaattgaatgtcacgccgcaaacgatttctaaatgggagcgaaatatcagttatccggatttggatatgttagtcaagctaagtcagttgttccatatttcaaccgatgctcttttaggcaatacaaaaccaactttttttgcttccttattctcaaaaaagaaaagagggaaaacgatggaaaaagtaccagcaactccgtccactatccaaacagacaagctgtcctcatctgagaaacagatcatgatttttagtgtcagcagctggataaccgagggagaactgcaaacacaacgtctgcagttaaaattacagaaatattttactgttcaaaggcagccgattgcggtagagatgtacagcttgtcaaaagtcgcagaaaaagcgccagctgctgatttgatcctcctgactcctgaagctcaatttgcattaaaagaactacaagaagccgtaccacacaccccgattcttttgcttagtagccaagagtacggtctactaccgattgaacaaatcgctgaaaaaagtttgcaagccatgctttagagcgttcaacaaaaatagagcgtggaataaaagtaaaaaacacttttgttccacgctctaaacacgtctaaacggtgagaggcgaagcaactccttcggaaataagtcgaaatacccccaaatttgaaaagtaatttccgtgtattcctccttatttctcggagtttaacacttctgtcccagcctctttcttatcctgtattagattttcagcaaccagatcaagctgagcgctgcaattgtttgaaccaaaccgactgaaagtccatagaaaaggaacttaggtccttctttcatgaatttacggaagtctaagcgcaagccgattgctgcaagggcgatggtctcaaaccaggtactgatgaaatgtgcagcatcattcaaccaacttggcaatgcaacgaagctgttcaagatacaaatcagcaaaaaacctaaaacataccaaggaatacgcaacgatcgtttttgttttacgacggatgcggattgattttgttgcgacaccattcgttcgaaaatcaaaaccaccacgaccaataaaatgatccgagcgatcttaaacagcatggcatatttgacaatctctgcatcaagtaagctggcacccgctacgacttgccctacggattgtagcgttcctcccaacagtgcgcttttttgtaaaacatccgaaccaaacaacgccagaccaagaaacggcaaagtcaacatcatcactgttcctaacaaattgacgagtgtgatgatctgccctttttcttcatcatcggcttggatggctggtgcaatcgcgccaatcgcagaagaaccgcagaccgcattgcctcctgccatcatcaaactcattttttgattgaatcccaacttcttgccaatcaagtaagccgcagtaataacgatcgtcatcatcaatacgatgaaaacaaaaccacgaatccccatctcactgatcgtttgaaaggtaacagtaaatcctagcaatacaaccgaatattctaaaagccgactttctgcaaatttcgttccttgcgcatactgtttttgattgaagaacgtattgcctagaacgatccctaataaaatcgccaaagtcgctcctcctaattgcggcagccaaagagccaagactttcgctacagccgctacaataaatgataacaacaagccaggtaaaaatggctgcagattgacgggtttgattttttcaacattcattcttgtccatcctttcatactgccttatattatacacagcatttttcatctataacatttattgatataatagttttaataggattttataatggaagtgattacactgctggaaaaactagaaacgttcaaaatcgtttacgaaacacagaatttctcgaaagccgctgagttgctgttcgtgtctcaacctaccgtctccgcccatatcaaacaattagaagaagaattgaatacccaacttttcattcgaaatggccgcatgaacatttcagcaaccccacaagctcacctgctttatcaaagagggctgaatttattggacgattggcagcatctctatcaagagatccaacaaggtacgcaacagttggttccatgccggataggtgtttcccatacttttgcgatctatttgctgccggatttgctgatgcgcttatacactcgctttccccacatccaatttcaagtagagatgatgaactctgccgctgtcctgcatgcggtagagcaacacgagcttgacctagggatcattgaaaagcccttatccgctgctaccgtggagcgatacccattgatgagtgaccagctagtattggctggcgatccggcagtcggaccgtggcttgtgcgagaacaaagttctggggtttattattatatgaaacgctatctagaagagcaaaatatccagacgcctattttacaaatcgccaataatgagatgatcgttgcattgttgaaaaaaggcttcggctgttcaatcatttctgcacgagctgctggagatgtcccccatgaagatttaggcgagcgttatcgccgccaattttatttggtcaaacggacccgcgattcctataaagaatttgctgcttgtgcttcttttatccgacaatggcaggaggaataatcggtgtctcttgatgccatcaggcaacttcttaatcttttcttacgattgaactgatttttttggtaaaaaaactcattcattgtttcttaattattttgtgatagaataataggggctctgacgttcccctataaagtaaaacagatgtgaacgaccacctagaaaggaccctgaaatgaaggaacagatcaaaaacaaattagctctcttacccgatcaacctggttgttacttgatgaaagacaaaaatggtacgatcatctatgtaggtaaggcgaagattttaaaaaatcgtgtacgttcctattttacaggaagtcatgacacgaaaacggaacgcttagttcaggagatcgccgactttgaatatgtcgtcactgaatccaatactgaagcgcttttgttagaaatcaatctcattcaaaaaaacaaaccaaaatacaatattatgttgaaggacgacaagtcctatccatttatcaaagttacgaatgaacgctatcctaaattgatcatcacccgcaaagtgttgaaagatggtgcgctttacttcggtccttatccggatgcccgagcagcgaatgaaacaaaacggatcttggaccgcttgtttccattacgcaaatgtggtgcatcgcaaaaacgcccttgtctctactatcatttgggacagtgcgtctgtccttacgttcatcacatggatcccaaggaataccgaaaaatcgttgatcaagtcaaacactttttccacggtggccatgttgagatccaaaaagaactaaaggaaaaaatgggcgaagcgattgaatcccttgaatttgaacgtgctgcggaactgcgcgatcaaatccaagccatcgataccgttatgacgcgtcaaaagatgactttgaccgatctgcttgatcgcgacgtcttcggttacagtgtggacaaaggctggatgtgtgtccaagtgttctttatccgccaaggaaaattgattgagcgggaagtctccttgtttcctttttacaacgaagcggaagaagactttttgacattcatcggtcaattctaccaaaagaacgagcacttcatcccaaaagaaatttttgtcccccaaacgattgaacgggaacctctagaagtgctgctaaaaacgaaagtcttgcagccacaacgaggtgacaagaaaaaattggtcgacttagccaataaaaacgcgcaaatcgcattggatcagaagtttgctctcatcgagcggacagaagaacgaaccatcggggcggtggaaaaattaggtgaagccatgggcatttcggccccttatcgcatcgaggcgtttgacaactctcacattatgggaaccgatccagtttctgcaatggtcgtctttgtggacggcaagccttcaaaagatgattaccgaaaatacaaaatcaaaaccgcacaaggcggtgatgattatggctcgatgcaggaagtgatctaccggcgctactcgcgagttttgaaagagaaattgccatttcctgacttgatcgtcatcgatggtggcaaaggtcaagtaggcgccgcacaagatgtcttgcataaccagttaggattagatattccagtagctggtcttgtcaaaaacaataaacataaaaccagcgagttactgtttggcgatgatctgcagccgattcagctcgaacgaaattcagtcgaattctttttgctgcaaagaatccaagatgaagttcatcggtttgccattactttccacagacaattgcgcagcaagaacagtttctcttcaagattggatgaaattcctggtttaggaccaaaacgtaagcaacagctgatgaaaaccttcaaatcgcttaaaaacattcaagcagcttccgtggcagagatccagcaagcgggcattccgcaagccgttgccgaaacaattttagaaaaactatccgatcaaaagaaaaccacgtcctagaaacactcggacgtggtttttgctggaatgaatcatcgaattgtttggaaaggccactaagacataaacgtgctctcaagggaatagcggaatgtttcgttccctttcaggcctgtctcttagatggctctttcacaaaattcgttacccagatatctagatatgttttcctaagcaatcaacaagttgacacgcaagccatccagttcagctttctgctcttgtgtgatatgagaatctgtaatcaaataatcacattcatctggtgcagcaaattgcttgaaactccgctgattgatcttgctggattcacatagaacaattttgatccgactaatattgatcaggcttttcttcatttcagccgtttcgtaattaggagttgaatgcccataattcttgtcaaaagaagtggtgcctagaatcactttatccacggaaaaacccgctaatcccaatgccacagaactgcctgaaacatagggatagccatttcggttctgttgcaaagttttaaataaagaataaaatcccttacggtatctatgatttaagctgggattcccaataataccttgatttcagtacagaccgaaaacccgaagagagtgccttcttttcgggttttcttatataatcctcgaatggcttccatgcctttaatcgtggtagaggcagtgcgtaaacttcgatagaatttattgcgtctctttactggacgatggtcttgttcaatcaaattattcaggtatttaatggtacgatgttctgtcccttgataaaagccgtattcttttagtttcttaaaggcacttgtaatagagggggctttatctgtgactacaaccttcggttcatcaaactgcttcactaaccgcttaagaaaagcataggctgcttgtgtgtcccgttttttacgtaaccaaatatccaaggttaaaccatctgcatcgatggctcgatacaaataatgccattttcctttaattttgatgtacgtttcatccattttccatgaataaaaggattttttatttttctttttccaaatttgatagagtagtttgccatattcttgcacccaacgataaatcgtcgtatgagaaacgttaatgccacgatcatataagatttcttgaacttcacgatagctaaggttataacgaagatagtagcccacggctacaataatcacatcctgctgaaattgctttcctttaaaatgactcatcgtcattcctcctgctatctttttctattattctaccttatctgatagtagatttaaaactttgcaacagaaccggactaactataaattcagctcctgccattatggctaaacgggcagtagtgacatctaaaactgttcccgcaccaattactacgctagaatccaagttctccgaaactaattccctaataacctctgcagcattaggcaatgtaaaagtaacttcgattccctttattccaccttgaatcaatgcttcacaggatcgttttccttgttctttagaagctccgcgaactaccgcaatgacacctgattcttcaattttagttaataattctacacgtttcattctttagcacccttctccgtctttcaaacgatacttcctatctcatttccattcatctgcatcccatactgaatagttaaatgaggatctttcatttcaggaaaaacaaccataatcgaagtatccttattgttttccttcaaaagagatagatcaatttctgctaacaacgtattctttgtgactctttcgttttcttctactagaatattatagccattaccttgcaattccacggtatcaatccccatatgaatcaatgcttcttctccatgctcacctttgatgattatggcgtgttttgtaggaaaaattgacataatcgttccattaaacggtgcatacacctgtccattttctggcttgatcgcaaatccttcacccatcattttctttgaaaaaacgggatcattaacatctgtgatttttacaacatatccttgaactgggttatagatcttttcatgtccagcttctttgacaatccctttcttctgttcttcttgttccattgcttcattagggtcgaaaaagaaatagaccaatccgccagatacaatcattcccgttaaatgaataatgaaataatctttgataccagttgcgctatacaaataagtaacaattccgggtatagctgccacacccataccagtacttttagcatgtaacaatcctgcaactaaacccgcagttgccccacctgttaaggcaaaaaggaacggtttgccaaattttagattcactccgaagatcgctggctctgtgatccccaagaaagctggcaatgaagccgacatcaaaaagccacgtttctttttatcctgaactttccatccagttactaaggccgcagttgcttgtgcaataattccaccagtaatcattgcattaaatgggttaaatcccgtattcgctaacaaatctgtttccaaagccaaaaatatatgatgcattccagtgacaacaatggcttgttgcgttcctccaataatcaaaccgcctaatccgaagggtaaaccaattactgcttttgcagcgcccaaaacaagcaattcaatgtattggcaaattggaccaatgataatcaaacctaataatccagcaactaaaatcgttgtaaatggtgtgacaatcaaatcaaggacatcaggaactttcttttttagtgctttttccgtttttgcggctataatcgccaccattagggccggtaataccgaaccttgataacctacaacattcaaatctaatccgaaaaacgtaaatgtaatcgcgtctgctacccctttagcgacatcgctaggatttggtaacaacgggttgaccaacatcaaacccagaacaatccctaacactggacttccaccaaattgcttcattcccgcccatgcaatcagtacaggcaaaaatgtgaaagctgttttcatcaaaatagttgcgattgtcaaaacatttgggttcatttctacaccaaaagcgttgatacaattgataaaaccgctaaataatccggtagcaaccaaaactggaataactggaatgaaaatatcccctaaaattcgcgatacttttttaggtaaagacatcccctcatatagatcgcctttaatatctgtatttaactcagtactcgtatttccaaccacaatagcatacacacgatcaacaaatcccgttccaagaataatctggtattgctctccagcaaaaaattgcccctttaccccatcaatattttcaatctcagcttcgttaactacttttttgtcgttcaaggtcaaacgcaagcgtgaggaacagtgtcctacagctcgaatgttttcttttccaccaatcgcttcaatgattgcatttgctaccataacatctttattttgattcattttttaactcctccttaaggtcttcctgcagatccatctggcaaacggcacaatgtccagtcagccatccgatcatgtgttggaaaagccgccgcagcttcctcatcaatatcgacaccaatacctggttgatcattcagataaatgtacccatcctttgcaaccggtgttcccggaaatactttgtacgtattctctttaatgctgcaactccattcttggataccgaagttcgtggaagtaatacttaaatgcgtattcaccgcatgcccgatccctgtcatatcacctgggccatgccacgcagttcgcacaccataagcatctgccaaggaaataatttttcttgttggtgtaattccgcccacctgactcagatgcaatcgcaaatagtcgattgtccggttttggataagccccgtccattcatggggattattaaacagttctcccattgctagcggaatattggtatggcttcgtaaatgctcaaaccattggacttgttctggcggcaatgcatcctctaagaacaacaagtcaaatttctccagctgattagcaaattttaccgcttcactgggagataagcgttcatgcacatcatgacaaagcttgatcgagtctccaaatttttctctcaatttttcaaacccttcaatcattgtcttcatataaacatctggatcgtagtaaacaccgggagtattatccttaggtaaatgcatcgcctgattatttccgccatacccgccaatctgtacgcgaatctgtttccagccttgatcgactcgcgtttgcactaactcaacagcatcactgacactttgtgcatcggcatgaatataggctggaacagcatcacgaacctttccaccaaacaattgataaagcggcatattcgccagtttccctttaatatcccaaagtgccatgtcgattcctgacaaagcgttgttcaataccggaccgtttcgccaatagctactcaccgaagctgtgcgccaaatatcttctatccgttgcggatctttaccaatcaaaaatggttttaagtatttatcaatcgctgttacaactacttcatatctctgtgtaaatgttgcacaacccactccataaatacttgggtcattcgttgtcactttaactgctactaagttgatgccttctggagccgtggtaattactttaatatcttcaattactagcgctttcatcatttgttaaaacctctttcttaaatttgactcaagtataagcgaatcctttttttctgcctatagcgtctgtgaacttaaataaatgattcagcattagattcttttcccaaaaattgaaatttttcccagatagtcaaagaaaaaaactccctaattagagagttttttctgtttatattccatatagcgtaagaatagaatacttactaaaataaaatagggatctaacacgctgtattttttccaattaccaataggaacttgctccaaattaacaaaaatattttcattactgaagtgggcgatttgattctctgagaagctcgtaatcacaacaaatggcacacccttcaccttcaagtctttagcaaaggaatgagcgttgtctgatcgtcctctcaatgaaataataaaaaccaagtcttctgtcgttaacgtatccgttagggaaccaatctcatcaaccccctcaactacgtaaaaatgttcatcacctgctagaaagacccgacgcatctcttgtgcgacagccctttgtagagttcctgtaccataaataaagacttttttactactttgaataagttgaaaaatcgttgagaaatcccggtacttcatttcattcatagagttagcgataatcgaaacatactgatcaattaagtttccttccaaatcttctgcttctaattctgctttaagtgcatacttcaattcagagaaacccttatatgatattttttgagcaaaacgatgaatactagatttggaataattgcatttttttgccaaattaactaatgttgattctgaggcttcttttttattgttagaaatgtatttccagattgctagatcattctcattaaggtcaaaaaaatatttactaactagctcttctgttttaatagacactatttttcacctcgttaaggtattttcttcattgtaatcttcagcagccgtgatcggatcaaaattagctaccattaagttattgattccatttattggagtaggtttattagtcaacgttgtctgaaagacgtcttgtaggtttgaggccggatctgtactaaccagcattactttatttccatcttgtgctaaagaagtggctgtcgcacaagcggtagttgttttccctacgccacctttaccagtgaaaaatagatatttagttaagcccatcttttggggcatatattgtaacatttattctcctccttacttaaactagaaaagaggctgttaacaacagccttcgcttccatcatttcctccacagcatccaccagagttattaaccggctgagcaacaaagtgaatcgcaccatattttccaaattcttctaacgtaggataagatccttctttgacaatttctccgtctagcaatgtaactggtaaaatatcatttcctttttgttgtaacaactttaaaatcgtggagttattaacaaaagcatctggatcacttgtaagattatgacgtgaagcttctactgaatctattccctcaaatgtctcaaaaactgaagtcaccatgagtaattcttcgtctacagaatccacacactcctgttgagcaacacattgctggttcaaatagttccaattttttcatcttctttttcttctttacaattacagtttgatgtatcacaaatgcaattctcttcattagaaaataattgcatcattgaacccataaattgatctacaaagctatctgtcaattgatatctgtgccatgttccatctttggtaacaagcacaataccaactttttctaatactttaatatggtgtgaaagggtcggttgagtaaaatcaaaatgatctaaaatatcgcatgcgcataagctgccacaagacaatatatcaatgatttttaaccgttttggatcagcaagtgctttaagcattactgacatttcatcatagttcatacttaatcctcctgaacatagacgcttatctatgcattaatatagataaatatctataaatcgtcaatcgtttctgtattttttatgcttgatgaataatcaatagaaccaaaaaagcattaacatcgataattttctttatcaatgttaatgcttcatattggtatatcgatctaatagatttaattcatcaaatgtaacacaatcagattgtgtcacatttactcgagatgaatttatcaattatttatatatgataatagtatatataaaatttcggaaggttaaaagtattaaataataatttttagggttctgttgcaaagttttaaatctactatcaaataaggtagaataatagaaaaagatagcaggaggaatgacgatgaatcattttaaaggaaagcaatttcagcaggatgtgattattgtagccgtgggctactatcttcgttataaccttagctatcgtgaagttcaagaaatcttatatgatcgtggcattaacgtttctcatacgacgatttatcgttgggtgcaagaatatggcaaactactctatcaaatttggaaaaagaaaaataaaaaatccttttattcatggaaaatggatgaaacgtacatcaaaattaaaggaaaatggcattatttgtatcgagccatcgatgcagatggtttaaccttggatatttggttacgtaaaaaacgggacacacaagcagcctatgcttttcttaagcggttagtgaagcagtttgatgaaccgaaggttgtagtcacagataaagccccctctattacaagtgcctttgagaaactaaaagaatacggcttttatcaaggaacagaacatcgtaccattaaatacctgaataatttgattgaacaagaccatcgtccagtaaagagacgcaataaattctatcgaagtttacgcactgcctctaccacgattaaaggcatggaagccatccgaggattatataagaaaacccgaaaagaaggcactctcttcggattttcggtctgtactgaaatcaaggtattattgggaatcccagcttaaatcatagataccgtaagggattttattctttatttaaaactttgcaacagaacctaacaatctaattccttgagttctttgtaaaaatattatgtctgctcaaaaataggtgctaatttataatattgagataatcaagaacactattggaatcgaaaaaacacttacaatacttgtgagaaccgatgcttgtgttgctaaaccaatattttttttgtatatacttgcgtaaacaactgcgtttgatggaataggcattgccattaacaatactaacatagaagtaattatttcgtttatgtttaaactgttcaaaatcttccaatagattaagggtaagacaatcatttttacgattaaaaagactagcatctctttatttttaaacattttccaaatagagacattgcctaacgatacaccaatgataaccattgctaatggggtagtgatattcccaagatatactaatgttttagtaatgatatatggtggtcggtaatttatcacacaaacaattattgctaagatcgaagcgataattgctggattaaaaaatttttttagtgaaaattctcttgtgtctcgcatcaaattttcaccataagaaaagagtactaaattacttggtaaaagaaatagcgtcgcataaatcattgctctatctcccaataccgcctgtacgacaggcaaacccataaaagcaatatttgaaaacatgtacatgaattcatatagtttcttatcattagtaattcctaaaacttttacaacaagttttgaaaaaagagcacaaagaacattgaataaaaagaatccagctatatttatgactaactccttgggattaagtgacgtcccgttacttacagaagataagatcgcggctggaatccccaaattcaagacgacttttgaaagaaaaggaatatgctcttgtgtaattagattgcatttactgcatatataaccacaaccgattaacaaaaaaagaatgatcatttgtgtaatcaaaatacttatattcaaactttaccttctttctttaaatcattatacgtgatgaaatcaatttgttctttttctgcaatctcgtctagttttaatttcattaaaaattctacttcttttactcttggaaagatgagcgaagaagtacttaataattcatcatcaatataaccaggatgaagaatcattacttcacaggctcttcttttactctgacacatttcttgaaatgttttatttggatcgtaatcatcattcatgctctccatccaaaaataaaggtcagtgctgccaatcgaacatttttctttagtatctgctatcgaagggatataaagaagaccatattttaaagcgactgcttcaattgctttaaaatatgtcgcattaaatactgcatgtgcatcaatataatcaggcttcctcccagtaagctttttgaaatataggtactgtgcttcaacctcattgtaaacgtcattataattcacaaaattgtgcattgaatgattgtactccttagaggatttgaaagttccgttggccgttacaagcgacgggatttcttttgaatttaatatcggatacccatttgaaatattgctatgcagacctaaacaaatgttttcctttttcacgagttcgtatccgttttttgaataggttagattaattatcagtccaatagtacgaagtttattatttgttactaacttagctattccgaagtttattccctcggaatagccaagatcatccgctcttaacaaaatttgcttcatcgttaaacactccagttcttattcttcactaacaccaatcaagtaagtacaaaaggcggatacgaaaaaggcggttctgttgcaaagttttaaatctactatcaaataaggtagaataatagaaaaagatagcaggaggaatgacgatgaatcattttaaaggaaagcaatttcagcaggatgtgattattgtagccgtgggctactatcttcgttataaccttagctatcgtgaagttcaagaaatcttatatgatcgtggcattaacgtttctcatacgacgatttatcgttgggtgcaagaatatggcaaactactctatcaaatttggaaaaagaaaaataaaaaatccttttattcatggaaaatggatgaaacgtacatcaaaattaaaggaaaatggcattatttgtatcgagccatcgatgcagatggtttaaccttggatatttggttacgtaaaaaacgggacacacaagcagcctatgcttttcttaagcggttagtgaagcagtttgatgaaccgaaggttgtagtcacagataaagccccctctattacaagtgcctttgagaaactaaaagaatacggcttttatcaaggaacagaacatcgtaccattaaatacctgaataatttgattgaacaagaccatcgtccagtaaagagacgcaataaattctatcgaagtttacgcactgcctctaccacgattaaagacattgaagccatgcgaggattatataagaaaacccgaaaaaaaggcactctcttcgggttttcggtctgtactgaaatcaaggtattattgggaatcccagcttaaatcatagataccgtaagggattttattctttatttaaaactttgcaacagaaccgccaacttattaggtcgccaacctcaagaaacacgtggtaagttcaatattggtagcctctctaaacgacctaaatcggtcagaagcagacaagagtttgggcattgggaattaggtacaatcgtttcttcacgtggaaagagtacaggatgtttagcgaccttcgcagagcgtaaaagtcggttatacattgcttttctgatcccgaaccgcactaaagatgcgatgcacagtgcaattgagaaattaacaaggaatctacctgagcacgccttagaatcatttacttccgatcgcgggaaagaattcgcttgttatccagatgtagaggcatcaggtattgatttctactttgcagatgcttacagcgcttggcaaagaggaacaaacgaaaattctaatggcttaatgagcgaattctttccgaagaaaactgatttagctacggtgagcgaaactgaattattcacggctctatggctaatgaataatcggccaagaaaatacctgaattatcaaacacctttagaatcattcatgcacgaaacttcattaattgagtaaagaaaaaatgtcgcaataattattgcaattcgtcataaggtttgttagttattcagtagacattacttagacatacactgttttaaaatacgagagtgcaccgatcaaatttgcgttgtttgagtaagcgcaaacctcaatttttactttatgcaacattttaccgaagaagcccatttcttcaaataactgatcgtattgtttttgaatcgttttaactaacaaaggttgcgcgctgattcccccaccaatcactactttttcgatatccaagattgcctgaacattcatgatcaatgatgcaacgtttcgacagtaacctttgaataaagacaaaaccctctcgtcatatccgttctcaatttcgcgaaagactgtttgtccatcatcgggatcctctaacgctaaaagttgaccacactgattcacaaaatgcactgctgacaattttcttcccaccatctgactagttatggggcccgcatcaatattcgcattgatgaaactgaactctccagcttgattgttggcacccatcaataagctgttattcaggatgattcctccgccaacgccacttccaagaatcacggccgcaccatctgctgcgcctcttagattgccttttgtatgttctgccaacgccgctgccttaccatcatttattaccgtgcaaggaatagcgaagttttttgagatcaatgaagctaacggcgtttcgtgcataaacggcaatgcgccgccatagtagactgttccatctgacgtaacctttccaggacaacaaatcgcaaccccagcaatttcacgatgttgtccaatcagaccatacagcatttccgtcagcattcctttgctttttggcgttggcactttatcttgcttcttcataccaaatgcttcatccacaatggcatacttaatataagtacccccaatatcaattgataaatagtcacgtgtcgccattccattcctcctaaaaaagcgttacaaacgcagtcttgtttgcaactcttcgtactgttattttgcctctgacttaatgacgctactgccattgatttttataggttatgaaccaatcaattgctttgcacgttgaatgactgttttcccatccatacggccatatgccgctatgtcaatcgcttcaacagggcagtctactccactttttatttttgctaattgaaaacgaacttgaggacctaacaggactacgtctgcacctgctgtatgttctttgaaacctgaaacagagtgcgcctcaatcttcacatcaaaattgtcttcctttgctgcttgttccattttcttaaccaataaactcgttgacattcctgctgcacacagtaacactatttttttcatcgtttactcctcctttaagcatccttataattattaaaatctacaatttcaatattattttgctcgatccaattttccagccactcgctgcacagaaattcacattccattggacgtatgaacgtataggaagaatgatccaagataaattgatctaaaaaccccggatgaaaaactgcaaccgaacaatactgagcatttattttttctaaattatgttcaaaatattctctagggtcgtagagaccatcttcattgaagcgcaataattccaatccgtatatttcattttcccattttttatcgaatgaaggcatcgaaaaaaataagtgctgttcatcagcaactgcctttactgcctggaaaaatataggcgacaggatagcatgaccatcgacataatccggttttttgcctgtgatttgttcaaatcgatcaatttgcgcttttatctcaatcacacattcggctaagtctactgtatctttcattctcttgtttatttcaccactggtataaaatgatccctcttcactcactaaagagggtattttagagggagcagctacaggatcgcctaagcaaatattaaggtgtaatcctatacaagtactaaccttctccactagtttgtagccctgttctgccgcgggcatgttggacatcaaacccacgcaagaaattaccccatcgctcacagctttaaagattccgtaattaactccttcactgattcctaaatcatccgctcgtaaaattaactttgacatgtaaccactcccataaagaatgtctctctaatatcatttcatcttatctgattttctcgacgatattctgtgggtgtcagtcgatatgttttcttgaaatttttaattaatgaatgttcggatgagaagccgctttccaaagcgatttccaacaacttgttttctgtatttaccagcagaaatttcaccttttctaacctgatccgagtgaggtaagctttgtagttgatgccaagttgttttttgaacatcagtgacaagtgctgtgaggaataaccaaaatgctttgcgacctgatccaacgacaaatttttttgataatgctcgcctaaatagaagagtattttggaaaataaatcaatggacccttttgggaagtcattttctgaagcattttcgatttcttcaataccgattgccaacaattccaacaaattactttgatagcgaatgtgcgaaacaacatcgtccgaatccatcagtgcatcaatattttccagaaccttgataaaatactccgcattttggataaggattactttatccatcaatactgaaggatttacgtattgagaaattaatccgaagttgatatgcaaacatttgaagtgatattttccagtatccccgatcatcttatgcaatgtttgcataccgattaaagcaacttgtccttcactgacctctaattgtccatcgggaaactgaacttgcatcgccccttcgataatatacgtaatttccaaccattcatgccaatgcgtttcaataatactttgacttaaattggtgcctgcctgctctgtcattagacaatatttattcggatcggttctccgaaagacactggcatttaaatcttcatattcgttatcaaaaatcattcgcatggaaacacctcattcgtaaattatgactaagacaattcttctccatttgattctatcacttttcgataccaatcgaacgaatcttttttccgtctcttcaaagttccttttccttcatcatccaagtcgacatggataaaaccgtatcgttttttcatttctcctgttccggctgaaatgagatcgatgcaaccccatggcgtatacccccacaattcgacaccgtcaatttccacagcttttttcatttctgcaatgtgttttcttaaataatcgattcggtagtcatcgtgaatactgccatcttcttccactttatctatcgccccgagaccgttttccactatcatcaatggcaactgatacttatcatataatcggttcaataccaaacgtaaacccgaaggatcaattggccatccccattcagactcttccaagtatggattctttgctgctccaaattgattgccgccggcttgttcagaattagcgctggtactgactacagtggagttataataactaaagccaatgtagtcgactgttccgtttttgagaatctcctcgtcccctggcactgtctttaattctacatgctctctttccagttctttgaatttatagttgggataagcgccacgacattggacatcgtaatagaaatccttaaagcctctttccaattccataacacgaatcgaatcatttggattgcatgtttctgggtagaataaaatattggcgatcattaagcctatcttaaattctggattgatggcatgtccgatttccacaccctttgcgctgcccaacaatagatggtaaatggcttgattttgtttcgtcaaatcggatgcatctgtaatccctagagtactgtagtcacgtaagaaattgatttcattgaacgtcatccaatatttgaccttatccttgtaacgatcaaaaacaactctgcaatagttggtaaagaaatcaattgttctgcgatccaaccatccttgatacgtgacagccaaatgattcggcaaatcaaaatgatttaaagtgacaatcggttcaatcccataagtaccgcataagtcaaagattttatcataaaaggctaagccttcttcattaggcgttgcctcatcaccatttggaaaaattcttgaccaggtcatcgacattctaaatcccttaaaacccatttcggcaaacagcttaatgtcctcttcataatgattgtaaaaatcagttgcgacatgactaggataatataattgctcatcaataactaccctcgctccacttggaacatcttcaaaacggtttatggattttctttcaccattttcaagctcaatcacaatcatacgcggttctgtcatgcttcctgcagtgataaaatcagaagtcgctaagcctttgccaccacttaaatagcctccctcatattgattcgcagcggttgcgccgccccataaaaaatctttaggaaatcccacttttctacactcccttatactggtcttcttacatctttatagccgtcagtccttggaagccaatctaagaacttttcgatatattcattccaaaaacgccactcatgctgataatctggtgctgacgtccaagtatgttcaaaattcctttcctttaattttttggcaaatttaacattatcttcatataaaaagtcattttcgccgcatgcaaggtaaataggttgcgtaacatctaaatcttccacaatatcaaataaatcaatcgctacaccttgcatgcgtagagctggtgagaatgcaccgattgcttgatataaatcaggccgctgcagtccattgtataaagcaccaaacccccccatggacaaacctgcaatataggtatcctctttccgtttagaaataggaaatgtatttgtgataaactccggaagctcttctgtgataaatttctcaaaatcatcgctctcattcgaaaggtaggctttattttctccggaaaacatcactactgcaatttttctttcttctgcaaacagttccacgttagagtatcccgtccattgtgcatgattattcccatagccatgaagtaaatacagaaccggatatttgaatggatattcgtgatgcaactcccctttatcttgaagaatttctggtatagaaatagttggtaaaacgaccgttaagtccactgttcgctttagtacgtacgaaatcacattacattgaatttttgccataaatcttcatccccatttagtagttgatttttaacttttttagtttatattgcttggatatgttcgcgctcttcttgaaccctgccccgttcttcttggattgctcttctgtcatccatcaagaagaacggcagatacattacaaaatgaataagtaagcataagaaccacaatagagctaatggaaatcctccagtgaagaatgttgttacgaaacctggcgttacccaaggcattgaaatggttgggttcacattaatatcaataaggttcatataaaacattgcaaacaatcctgaaactaaaggagacaacaccatcggaataaaataaagtggattcagcattaatggaaaaccaaaaataataggctcattgatattgaagatattggctggaatcactaattttctcattgctttatatttttctgatttagcaaacagcgtagcaatacataggcctagcgtatttccagctcccccgatttgaaccgcaaatccaacaatggcaaatgcataaaatggcaattcttttcctgcaagaaatgcttcttgattcgaaatacctgccatcgttaagataggcacataaaccattaagattgtatttgggtgaaccccaaagaaccagaagagattcattagtgtaaatactacaatcaaagcaattggagttgcgccaaaagccgagatcggttcagcaataatagtggttatcattgtaaaaacattaccgtaaggtgttagccctgtcacatatttgataaagaaaaccaaagaaaagatgatcattgccacaaaagttggcgccatggattggctgacatttggtggaaccgattcaggtaattttaagacaagtttctttcttgttaatttcacatacaaccagggaatgaacaacccaatcaaaattgcaacaaggatcccttggcttcccattttttcggttgctattgctgtaactgaggatccatcagcttgggtaagtttctcaactggcataagcgcaataaatgatgccaaagataataatgccccggtcatcccatgctcgccttcgttgactgtgtatcgataaccgatcgctcctactacataaattgctagtaaggataatgttaatgtgatgacttggttcccgacatcatacaagccggcattctgcaaaaaatttaaccaggctggtatcggaaaatttgttaataccgcaatcagcgcaactcccaaagtaattggcatcgtaagcataaaaccttccgttaatgcgatgatgaacttatttgatccgacttttgtcgcaattggtccaacaattttttctaaacctgtttgaaatttatcgtagaaactcatttttacaacctccaaatttctttttgcgcttaagccggcttttaagcgctttctttaatgcgctttcattatatcaccctattaatattattaattgaccatttaccgctaattagtgttctttttttaacattgatagcactctctgttcatccagatccgtttttacttcgaataaaatcagtacagtttcttcttgtttttgcaaatccatttatacaattttcccagcagcctccaatttcctgttgccgtaacagaaagggttctgttgcaaagttttaaatctactatcaaataaggtagaataatagaaaaagatagcaggaggaatgacgatgaatcattttaaaggaaagcaatttcagcaggatgtgattattgtagccgtgggctactatcttcgttataaccttagctatcgtgaagttcaagaaatcttatatgatcgtggcattaacgtttctcatacgacgatttatcgttgggtgcaagaatatggcaaactactctatcaaatttggaaaaagaaaaataaaaaatccttttattcatggaaaatggatgaaacgtacatcaaaattaaaggaaaatggcattatttgtatcgagccatcgatgcagatggtttaaccttggatatttggttacgtaaaaaacgggacacacaagcagcctatgcttttcttaagcggttagtgaagcagtttgatgaaccgaaggttgtagtcacagataaagccccctctattacaagtgcctttaagaaactaaaagaatacggcttttatcaagggacagaacatcgtaccattaaatacctgaataatttgattgaacaagaccatcgtccagtaaagagacgcaataaattctatcgaagtttacgcactgcctctaccacgattaaaggcatggaagccattcgaggattatataagaaaacccgaaaagaaggcactctcttcgggttttcggtctgtactgaaatcaaggtattattgggaatcccagcttaaatcatagataccgtaagggattttattctttatttaaaactttgcaacagaacccttttcgtaatctaggaaagccgttaactccgttttgagaagcgtattgactgctttctccaaatggacacggaataattcattcaaatcgcctttgttcgctagagtctttagaatttctgtagtaaaatcgttcatagggaagtcctctcttctgtgaatgtgttgtggtagctctattctacagaagggacttccttttttctatttacacaaaatattttacactctcttcagtctgcatggaaatcaagttattattgggaattccagcttaatctatagtaagcaatatattcttattattcattttgaaatttggcagcagagtcttacatttttttgtcattttttttccacatttttaatattagcgatgctattttatcattaagtactatcaaaaataggactgtaacaataatcatcgtatcgtgatttggaaaatacctaaatcctaataataaaaatagtagtgctatgaatgttattacataagctatctttctttttctatctaccgtcacttcattcaccttcgatcctactagctatcctgtgtccatatagcagttggaactaagagatgggctttattcctcgaaaatcttataattactcctttgttgagatccacacttcctgctttatctatcaagaacgctgccgcagtcgatgcgaaaacacctgcaattggggaaaataaacttgatagagccccaactcctagagctaacgctgcttttgaatacgaactatctaaatataggtacttcaagtcattgctcattacaatcattttatttacgcctctacgtagcatgactgatctggtattcatttcaatttcttccttggtccaaatatcttctggatcataacctttctcaattgctaaattcattaggtcttggaaagttatactggtgatttctgctataacctcatctgaaagatattctagtggtacaccatacgttccttcttcatctacatactcattttcatttgtattggtgttaacttctgatgcaattgctacagtattcccaatagttccaacacctaaaattatcgcagcacacacacaaatcgctttaatcttattcagcattttcatctacctcgttttaattaattacttttacaatattacaatacacaattatacacgactaaacaatgtataaaattgttctttcggtgtttgtccacttcatccaacacaataatagaaaatagttagtaagagaataataattagtattcatcaaaaactgaagaaagattacccttttcgatttttccttattctgaaagcgtgctatcactgaatccaattattgcttcaacttctttatacgatttaccgaaaataatttatccataaacagaccacttttttggcgtactggttgctctcgagcagccttccttgtaatcttgtaattccgattattctttcttttaaaggatacaagcgtatttacatcgagcttaaataatcgaaaaaagtatttcttttctctataagttccttcattagaatcatcttacaaatctaaagacatctgttcaaaagcgtgtggctttcattttattgccttaacgttataatttatttgcgaaatacgataattggtacaagttacaacacaaagggccgacctactgcgaataggtcggcccttattttgtgctggaagcaacggctagcgactgtcctagaagcagcttacttttgatgattgtattcttagaaataagttctagtaccagtcctataaagattgacgccataatcaatgcaataatttggtcaatcaagaaaaaacacccctgaactcatccatcccatagtaaagactgcaacgtgctcctcgtttatggatagcttttcctcataatcatttactttactactgtttcagaatatctttaaccagttactagtttacttctctttattagtgaagtgggctagttctgcatattcttagtaaaatgctttcctctccttcactttatcccctgtctttcctaggaacgagtccaagcctctctcatctatatcattcatcccttttgctgattctgaacagctgtctctttcagttggcggttctctgcggctaaacgctcctgctcactacgggcttttgctagttctgcctgatagataatgatctcttcttggtgggctctccgagcggcacttacgctagcttccagctcatccacttttgtttctagttcgagattgagcttttcatacttttcatataagatcttagcattttctatattggtctgctctaagtttgctttgctcgacacccgagtagcaaagtaggttagaacaccggtaatcaaggaaggtaaaacgactgcggcaactgttgtatccatagataacccctctctcattctctttttgatacaaaatgtatcaactaattggagtatattcgatacgattcatatcgtcaactaaaaagatacattgcatatctttattcaatcaaattagatacacttcgtatctaattgtggtatactgatcgaaaaggggggatcaccatgcttggtgaacgattaaaagcactgcggataggaatgaatcaaacgcagcaacagattgctaaccatctaggaatcacccgggccgcctattcgcattttgaaaacgatcgaaacgagcctgatggtgaaacgatcgtgaaattagctgaattattccatgtctccacagactatttgttaggacgacatgccatagacaacttcacccaaccttctaagcgggtgcaaacagtagctgcccatattgatgaaaatgtaaccgatgaacaaatggaagacattctgaattatatcgactttataaaacagcggcatgcccaaaaggattgatgtatatggataaagttgaagaactaatggctgcatacccagatctgcattttatttttgataaaaatatgccagaaggtcaacaaggcttatatatcgatgatcatatttatctgaatccaaaacaatcgaaagcagacttgttagggaccatgggtgaagaaatcggacactatttaacaagtgcaggagacatcactgcacaagataccaatgaaaagcgtaaacaggaacgtaaggcacgtgacattggtgcagcaatcgttgtcacaccttacgatatcatcgcctgctttgaagagggctgcaaaacgttactagaatgcgcctcttttttaggggtaacgacgcgaacgctcaaagatgcggtctgttactatgcccgacgctttgacggaatcaagacagacaatcagtatacgttgctgtttcaattagatggaaccattgaggtgatcaaaaccttttagttactagctgtgagcgttgggcaatatttggatcagtgaagacacttcttgatacgattctacagctttactatttcttaaataacaaaaaacggcactgtgccgtcacgttcataaacagagcgctcattaaaagctttacggtacattcgctactcatcagtggcgcgcggatgtaccgttgatttctgattatttcgattgatgcacaaggccgttttctattcttgggtcatatctacaactttcagcagtcgatttggcaaataattctcagaagtttgatgaatcaatttaccggattcaaaacgatacaaattatagccatatcgttcttcgaagcgcacgatgccttgaccttcatcttctcccacaaaagacatactggcgacagtatagtaaggaatcccttggatctcaccggtaaaggaatgatgcgtgtgaccattgaggatacagcgaatgttataggaggacagcaagtccaacaaacgatccgtaccgggccacaccggtgtcgtactttgatgtgccagtaaatgatgatgggtcactaagacgatcggcagattttttaattccgctaacgtctgttgcagccagtggaattgttgttcatcgacaacgccatcagaagctccatagcgggaattatcaaaggcaacaatcgccatatctgaataacattttacttgattatatggcgactcggaggccgctgtaccgcaccagcctatgtggaaattgcttttgatgtcatgattgcctaaagtaacgattatttcgacatcgcctagcagcctatgcagttgttctttcaagtaacgatagtcttccacgtctccatcctccgtcaaatccccactgataacgactaggtcaatcgttgctcgttgctgggcatggcgaagacattctgttaatggaatcaatggattctgcatggccgccaacatgccttgataaccctcttggcagtctgggtattgtctgcgaaaatgtatatctgatatatgcaataaattcatcttttatctcaatttctttcttatgattcctgttatttggtctaaagcaaagacggtgatcactacaccgatcaaaataatactaactttactccacgtacgtgtttggatcgcaaaaatcaatggtgcaccgattccgcctgcaccaactaagcctagtgttgccgcactacgcacagcgatctcaaaatgattcaacgcaaaggaactatagatcggcatcaaataagggacacgtacaaaaaacattgtttgccagaaatttgcacccaccgcctgcatctcttcggtcagccgttcatccatcgcttccatctcttccgtaaacaacttgcctaacattccgatttgatggacaccgattgccatcacaccggcaaaaggtcctggaccaacgactttaacaaaaatgatcgcatagaccagttctggaaacgcccgcaagacgttgcaaataaatttaccgattttagcgacccaaggagttgctgaccagagattggccgcactcagcaatgtgatgggaatggctaaaaccgtggcgatcatggttcccaagcaagcgatgccgatcgttaataacagcagactaaataaatcttccccgctgccgtcatagaaaaatgaccagtctggctgactcagtcctttcaacacatctctgcccattgccagtgaaaaagtgcttaatcccgaatagtctaagtccattgcagacaacaggaacaggactacgaatagtccccataggagccacgtttttttactcacttcacgaatcatcatagaaaggacctccttactcgttcacttaattggtcaacgatggccacagtgactaaaatcgtcaaaataatgatggaaactcgttcatatttcagcaatgccaaagacgaattcaaaatgacgccgatccccccagcccctacataacctaggactgtcgaagcacgaacattgacctcaaatgcataaaaggtatagctggcaaactgactgatgacttgaggagctactgaccagactgcaatctgcaatttgctggccccgaccgccgccgcagcttcgatcggaccaaaatcgattgtttcaattgcttggaacatcaactgagagaccatcccaaatgtaaagacagcaatcgtcaggacccctgttgcttctccaatcccaaagatagcaacaaacaatgcagccaataataggttaggaatcgtccgaatcaagcccaataaaaagcgaaagatcgtcgaaagccagcgattttcagtaatgactgtcgtagccaagaaactgaccgggatcgctagacagacaccgatgaccgttccaactaaagacatttccaatgttttaagcattggcgagactaatttcggtaaatagctaaaatccggatgcaagaaacgtgcaaagaatgccgttacttggttggaatttgaccagacttgcgcaaagtcagcccctgtgatccatgcactgctttgaaagcaaagaattaagaagagcaagatcagcaggttcttgtaccacttaaagtgaacggtctctttcaatttcatgggtttctcctgccttttcttcaaaaatcgccttgccataaatctgttccagccgttcatctgtcaatgcttccggcacaccatcaaaaacaaccgttcccgctttcaaagcaatgactcgtgtggagtaagaccgtgctagcggaacagagtggaggttgacgatcactgtttttttcatttcttgattgatttttttcaagtcctgcatgactttctctgtcgtgatcgggtctaatgaagctactggctcatctgctagaataatcggtgcttgctgaacaagcgctcttgctattgagaccctttgctgctgaccgccactcaactgatcgctgcgggtctgcagcttatccaacagaccaaccgtggctagtgcttcttttgttcgttgatagtcttcttttgtaaataatcctaaaatacttttccaagttgaataataccctaaacgtccagataggacgttcttttgaacggtactgcgtttgactaaattgaaactttgagagatcaatccgatttgacgacggatcaatcgtaattctttcttgcttgccttagtgatcgaggtctcattaatgcggatatccccttcagtgatcggcactaaacgattgatcgagcgcaataaggtgcttttccctgccccactcagaccgatgattgagacaaattctccctcttcgatcgtcaaattaatgttttgtagtcctttgaccccgtttgggtatactttggacacattttcgaaaattatcatacttcttccccatctttataagcattgtgacacggatcataccaaaagaatgagagacgaagggatactttggtgggatcgctctcgttttcactatatcagccgccctcgcaaaaagatctgcacccttcgtccaatcatttttctgttattccttgtcgcagcccattgttttactcggctgctttttcggtatattcacggatcgtatcataagcagaatcagctgcttcttcatatccttgatgtccccacaatgacatcgcttctgcgccttcttcgtcatctttcatgttcaagaaaacatctttgatttcttttttcaaggcatcgtccatttttggttggaccgcaatagcatcgttaggaatatccccttcggtcagataaagtactttgagctctttaaacaaatcattgtctgcaaagctagaagcaaagacatttcgcgcaccttcgaaaacaaacgcagcatccatttgaccattcaagactgctgtgatctcacttggaatatcattgactgttgtcaaagtcgcttcggtggtaggatctactccggcatctttcatttcagcaactggatagatgtacccactagctgagttaggacttaaagtagcgatcttcttgcctttcaaatcagtcaattcattcaatccgctgtctgcacgaactaagatctcccctttgaaagtgtttgtcaattgaccttctaacggcaaccccgtttcttgatcataatcccctaattgcgaagtcaaaatggcttcagcagcgtccatatcttttgcttggacataggcagctggcggcatgatcccgatatctacttgaccagaagccattgcttcaacgatcgttgagtaatccgtagccaaggtcacatccacctgacgatctagcttctttgataaatattcagcgaaaggttttgcttttgcttccatcgtcccatcgttgttggtcggtacgaactgcaccactaatttttcttttgctgcatcctcttgttttgaattgccactggcacagccagttaaagcaacagccaacataactcccatgatccctttagcaacctgtttgaaacgcatttttattcctcctgtgaatgttttctactacgtgtaaatcataccaaataacttcagattaagaagtgacacatgtcctattttaccttatttttacatacattttacatataatattaattatcgttcgtgttgaggcgttgttgattctaggctataataaagaaaaacctccaaggagtggtccttctccatgaaaaagatccatgatgcgcaacagttatctgcttatatcgacaccttttctttgcaaaattatttagatgcggcgttatctgacatggcggtattacactctttcgacaaagatgagcacttgatccagacagggaccgtatccgattatctctacttccttgtggaaggaaccgtgatggtctactcttacccttctgatacccaaaatatctttatcgattatgccaaacccgccactcttttaggcgaagcgtcctctttatgggaattattgccaaaaagcagtgtaaaggccgtgacaccttgtatctgcgtgtgcatttctttgaatcgctatcgttctgttttacaacaggatgttcggtttttgcagaacatttgccaactcctcagctcacggctcaattcagggatcaacttagccaattccctcactgagccagtagaaactcgtttagcaaaattcattttgcttcatgaagaaaaaggggtgtttacgcatcagttgacgacttgtgctgctgtcttgaatgttagctatcgtcatctcttacgaacgatcacaaatttccgtgagaaccgcattttagaaaagcaaaaaagcaagtatgtgatccgtgaccgctctgctttagaagttcttgctgaaaatctcagtcattcctaaagattctaaggatctacgtatggagaaccttctgagtggaaccgcgattgccaaagtctatttctttaagctgtgattcaatgtcttctttctaactacagatactgacctaagctatctcctctaaagttgccttgacagatagcatgttagtcatttcaataaaacagcccttcagaaagccatcattctgaagggctgttttattgaatgccttgctttaaccatttgactttaaatgcaaaatccgtcaacagttcattgcttgtccattgattggcgtaagcatctgttaagctgtcaatgaccagtttcatcgagaaatagagaaaactatcggcctctttttgactttcgatccgaaatttatttgctgttaatacttttttccaagctgccgcgccatgaggatcctcactgcgatatgaaaacaaataactattctggatcaatagctgcaattctttgtattcctcactatctttgccatattctaacgcttcaactaaaaaaagctccaatcctttgaaaaaatcctgctgatgtttcccaatttttcttaggatacgaccatgaactttgtttgctgagtcatggatcaagtaatcataagcatcattcaaatcttcaaaatacttataaaaaattccccgagacatctgcagtgcttcaacgatctcactgactttcacctggctaatcggtttgtcagaaaaaatcttcagcaaaacgtttcgcacaactatttttttctcaggaggaagattattaaaagtcgccttaggcataagccgcagtcctttctttgaattcgttgctttattatagcatagatggccgaaattaattcggtgacaaaatgtcaccgttgaggtatgatggatttcgaaaggggaaatcattatgtatttagcttggaaagaaatccgctatgccaaattacggtatagcttgatcattggcatcatggtattagttgcatatgtcgtatttatgctttctggattggccaatggtctgtcagatggtcacaagaaagcagtcgccgactggggcgctcagacgatcgtactatccgaagatagtaataaggtcgctagtgcttccattctgactcgcggggatttatcccgcgtggaagcaaaagaaaaagccgcagttggtctggcttcttctgcaatctcccataaaggaaaaaccgaaaagaccaatatctccgtctttggtgctgaggccgatcaattcgttgtcccaaaagtgatcgacggccgaaactatcgctctacaaatgaagtgatcgtttcagaaaaccttctgccagaggggtttgccttaggggatcacattcaattaggcggcgatgatcaagtctttacgatcgtgggcgtcacgaaagcaacgacttacagcgtggtccccgtgctttatctcaacctagatgcctatgctcagcttaaatatggtaatcaagagtttgatcaaagcaacggccctatttcattgatcgctactaaagagccgaaatctgacgtcaaactcatccaatcaaaggatcaaacaaaactaacggcattgacttttgatgattttgttgagaacttgcctggttattctgccgaaaaattgacgttgaatgcaatggtttactttctatttgtagtggtagcagcaattgtcgggattttcctctatgtgatgacattgcaaaaaacagccctctttggtgtattgaaagcacagggagtttctaccggctatctcgttcgttccatcgtgggacagtcattgatcgtaagtattgctggcgttttgattgcttttgttctcagctatttgactagtctagtattgccagctgcgatgccgtttacagtcaatttactgcagtggtgtctttatggcatggttctgatttttgtctcgatcatcggtggtttattctccattcgaacagtcacaaaagtcgacccgattacagcgattggaggcgaataagatggcacaaacagtcttatctatggaacacattacaaaaacatttggttctggccataccgcagttactgctctaaaaggaatcgatttttcagtgacagccggtgaattcgtcagcatcattggaccttctggatctggcaaaagtacgttcttaacgattgccggcggactacaacgcccctcagaaggtaaaatcatcattggtcagcaagactttactgatttacctgacaaaaaacgatctgctgcccgtttcaaagaaatcggctttattctgcaaagttcaaacctcgttccttttttgaaagtcagtgaacagtttgagtttgtaaacaagctgaacaaagacaaccaaaaagaagcagcgtctcttttacgttccctcgatatttgggagctcagaaataaattccctaaagaactctcaggaggcgaacgtcaacgagtagcaatcgcacgcgcattgttcaatgatccttcactgattttggcagacgaaccgacggccagcttagattcggaacatgcttttgctgttgtcaaattattggctaaagaagcgcatgaaaaacaaaaggcgatcatcatggtaacccatgatccaagaatgacccaatggagcgatcgggtctatcgcatgcaagatggacttttagtcgaagaatccatcaacccgcacacttcatcaaaaacttcagaagaataactaaaaaagctatccaaacatagggactcgcgactgcgatgttccttccgttggatagctatttctattacaattcactgattaagacgcaccaggtttatttgacgatcgctaagaaatcttccccttgcaagacgtcttcttgattcatatccaacacatctaaatagttcggcgtattcgtaacaacaattggcgtaacggttgaatacccggcttctttgattagggaaagatcaaatttgactaatagatcaccttttttcacttgatcctcttgtttgacaaaaatctcaaatcctttgccctcaagctcaacagtatccattccaatatgcatcaagatctctaccccatctgtcgttgtcaaaccaatcgcatgtcctgttggaaatagcgtagtaatcgtcccgtcagcaggcgcgactaatgtaccgtttgctggatcgatggcaatccctttgcccattgctccagatgaaaagacttggtctttcacttcattcagtggaacaactctaccagccaatggactgcttaatatgacccgctcattggtaatggatggtgcaggtacttttgatttttctgtatctgtatctgcgggattcggttgatcttcaaagcgcaaaacaaaagttaagacaaaagctgcgccaaaagcaacggccgttccaatcgcagcggcaatcaaaccactcatatcttgtgtgtcttgagggataaaggatggtaagctcaagagactgactaaaccaaaagtatagttcttaacttgactgaaaccgacgattgcaccaccgatcgcaccactaatacatgcagcaataaacggttttttcaatggcaacgttactccatatacagttggttccgtgataccaaacaatgacgtgatcgttgatgaaagagccaatcctttcagcttgacgtttttggtgataaagaagacggctagtgctgctccaccttgtgccaatacagctggcaatagcatcggcaccattgtatcaaaaccaaattgtgtcaagttcaccatcgcaatcggcacaaagccccaatgcattccaaacatcacaaatacttgccataatccccccatgattgctccagcaagaattgggctgagattatagattgcatcatagccgctgcctagcaagttcccaacgatcgttcccaatggacccacaacgataaatatcactggtgccatgatcaagaagacagctaacggcacacagatgatctgtaggaaactaggaatcacctttttaaagaaacgttccacatagctttgtaaaaagacggccaaaatgatcggaatgaccgaggaggtataggcgctggccccaatgattactggaatacctacaaaactcaatgtttgtcctgctaattctgtgatacttgggtgaacaagtgccatggccaaagaaacagctagaaattcattggttttaaattttttcgctgctgtaaacgccaacatcacaggtaagtaagtaaagagcccatcagcaatggcataccaaaccgtgtagacgccagaatcggccgccagccaattcatcgtcactgctaatgtcagaaatcctttgagaaccccggccccagccattgcgcctaaaaatggggtaaagatcgatgagatgatatcgatcaattgattcagcggatttcctttttcagcagatttttctgattcgccatcaaaattggcgacccctgttagttcgcgatagacatcactgacatggctgccgatgacgacttgatattgtccgccactttgtacgacttggatcacgtcatcgtcttgattcaaccgatttgtatccgctttttcttcatcttttagtttgaaacgcaagcgcgtcgcacaatggaccacactgttgacattttctttgccgccgaccgcatccaggacgcggactgctatttctttgtttgtactcatttccaaacactccttttttaataaaataaaaaacccagattgaaaaaacacggttaacaagcgcaaacttgctaactgctgtcttttcaatctgggtcttgcctgctgtacagtaacaatccgttaatgattgaatgttaatttggttcgttgacaacgcgttcaatatggatcgtcaagtagatcatttctgactcgccgattggcttgccatacgttttgatcagatattcgttgatccgctggactgtctgaaaggctttcgggtattttgcctgaatcagttcaaacaggaattcgtccttctcgcctgaaaggtcatcacttaaataccgttgagcgaaatagtgaagatgagtcgtgatccgttgataattcaaggaatcaggattaaagactttgccatagaaacgactgatgatcgctaacacatcacgaacgatctcaacggcttgcatcgtcgtctccatggttccattggcttgctcactattgacaatgtgaaaggcgataaatcctttctccgcttcgggaagcgaaacaccaaagttcttttcaaagcgttcgaccgctttagcagcgatagcgtactccttaggataaaattttcgagtctcaaacaatagtggattcggtatttcaattccttctcgagcccgcatcaaagcatagtgaatatgatccgtcagcgttaagtaaatattcggtgaaagttcgactcccaacacttgctctgcttcgtcgaccacttgcttgactgcttcgacctcttctgcaggaatatccgcaaataattgttgaaattgatttgcggtgaaagagtccttcaaaacaaattctttctccacaaatgcgtcgtcgatcacatcgccgatttttttcttaaatgcgatgccgcgtcccatatagatgacttcttcgccggcatcattggtggagaccacgacattattattcaatatttttccaataaccatcgttttccctcattccaaaataaaaaaacctagaatttccccataaatctgcggtcaattctggttttgcctgccgaacagtaacaatccgatgtaactgaaaaaataatagcacatcctttttgagattgcaacccttttcacgcaagattctttctccaaaaaattagcggttctaatggacaagctagatagttgttttatttttcagaatcttgttcgctcgcaacaactccgttaagacaattcatttccaaaaatggtcttaacggagttgttgtcagttgttgcttaggtctcgccggcgtttccatactgcacctaaagtgccatacgtgaatactgcgatacctaaccaaataaatccaaacgcggtgaactgcgccaaagaataagattcgtgaaacaagaaaacagctagtaatagcatgatcgtcggatttacatactggataaagcctaatgtgatgtaagaaacgcttttcgttgcttccgcaaacagcaacaatgggatggcagtcacgacgccggcaccaataagtaaaagattggtagataatggataagccatcaatccaacagaagaaaaacctaaaatataaatcaatgccgccggcaaaataacaaaggtttcaactgttaatcccgttgcagaactgattggtatgtgttttttgatgagaccatacgtgctgaatgaaaaagccatgatcagtgaagcataagggatcgcaccagtttgcaccgaaagcatgatcactccaacagctgccaaaccacaagcaatcatccccgaccgactcaaccgttctttcaaaaaaacagttgccaacaaaacattgaccaatggattgatgtaataacctaggctagcttccataacatggccggcactgacagtaaatataaaagtaaaccaattgattgaaatcaagatcgccgccaaaataatcattcctgcaaactttttgttttgccagatccgcttcaattcagaaacaaactgttgccatctgccgctaagtccgataaagccaagcataaagacaaatgaccaaataatacggtagcacatgatcgccaatggcgagacaccagtgatcagtttccaatagagggtgatcagcccccacagcacatacgctgtgattcccaacacggttcctttatttttcattttcctagtcgctttttaccttgtcaacgtacccatagtccaagaaaaaaacttccctcctcaaatataagttatcttattataacgaaaataaagttttttcctagtatttcatgaaaaaaacaaaaaaagtcccaaccgatagctttcaaaatttgaaaaatcggtgggatttttgagaaacaacgtttaatcatttgttgcttatactctatttgttactaacttcatagcagacgaccttatttttcttttaccgataagcggcgcatataaaaatagaaaagcaaatcaatcgtaacaatttgcaaaatgatcgaatgagtggccccacttccgtaatgaccatttttgatatcttctgtccgtgctgtatgaataggtgtatctacttttttagtcagctggttctgccctaattgagacattcctaaggtcggcataccaaggcttttcgctatttctactaatgataaaacatcgcggtttttccctgaatgggagattccccaaaacaaactgtctgcgccatcatttttcatttgttgtgtcagaagataccgatctttatcaaaaatcactgtttttccaatccgagtccatttttgacgaatatcctctgctgctagaacggaagttcctacaccataaacatagattcgtttagcatgaaacattttgtctactacttgttgcacggtttgttcatctaatataggatccgttgcgtcaataatcatcttattgtttctaagaatcttatttttagccgtttgaaacgaatcatcattttgaatatcgctatattcattatagattcgattttcaatatctttggttaaggctaacttaaagtcagaaaatttactgaatcccaattttttagaaaatcgaatgaccgctgctggacttgtattcgaatgaacggctaacacattagatgtcatagtaggtatttcatcaagattctcgacaatataatctgctaacttcaaatccgtagtcgaaagttcatttttgatactttcaatagttgttactacactcatttctgtccccctctactgcatagttgcttcagcaattagttacttctattttacattaaattcatgtcgaactgagaagtttacgataaaaataaaaggcaccttttgtatttggtgaatcacttaaaaccacttccgtaatttgatcttggagacgagcaacaaccgattctcgaataaagtgatttttttctagcactgaacctgctaaagctaacttcacttgggtttggttcattctgtttagtaacaaacgaatcatttcgatcaattcgtcagcagtttcttgcaatagttgatgagtgatggggtcgtttaaatgcgccttcgaaaaaaacaatgatttttgtgcaacttcagccttgttcatctgataaagttcactaattgctttagctggatcgttcatatctaaaaaagatagaaagtcttgggagaatctagacaaaggtgaaccatggtccatttcttgtgcaatatggcgatagcatttcagtgctagagcataggcacttccttcatcccctactaaatgtccccagccccctactcgatagaagtttctgtcaacagatccataggcgactgatccggtcccagaaataatcaaagcgccatccgatccttcaagtttattgattaaccctaagtgagcatcagaaatcactttgattttttgaaactgctgcagctcatgttgaacaagatgatgtaacccactcgtctctatacctgcaattccagctaaaacgccgatgcaattgcctgattgatgttctaaaacagactggatcccttgtctcaaaactgctaatgcacgatttgtatctaccacaatatttccagctgacaggtgcaaatcaaagagtgctcttccctttttgtcataggtagtaaattgggtctttgtccccccagcatcaattcctagtacataattcatttcttttcctcctaaaaaactgcaatagaaacgttccgacaatctagtgagtatctgatcagtgataaaaaacgactatcagcattcgaacagtattcgaagataatggatcattctatctcctttagtactgcttgctaagaagagaggatttccccaataggttttggcttattcattaaatccttatcaaactattgctttatgaacagctttattcagcagtttacgagtcactgtatcatttgtcgaggatcgtttctatcacagcttaatggatgttagttctgattgaattgattcaattgctgttgcattttaatcagtcgttcaatcaatgcttgctcgctcattgttgtcattaactggtcttgcgcatgaatcaacaaaagactgatctgcccttgaccttttagatcatcttgaatcaatttcgtctgcaaattatgagcaatggtcatctctgcttctgcctgttgcatacacattaccgattgctcatgattgtctgcttctgctgcatccaacgcttcaaaaagcattcctcgcgcattgccactatgaacgattaattcaaaaatcactgcttcgatattttccatgatatcacctacttcatttaaaatcatttttttcatggttagaactgataaataaacaactcgcaaataaggaacattgctgcaaaggttacaatcgaaaaataagcatatcgttttatggtaaatttttcttttcggtcaacatataacgcaatcgctggaaagataagactgatagaaaccaaattccctataaataaaaacgtctcagactgtacgtatgaattgattgcaatcaacaggatgttcacgctaaaaacagttcctaaataaaataatgcacctttgaactgcattcttgtttttctcatgcttcgccttccatttcttgcattaattgtttattgtcataaatcttgaagaagggataataaacgaccgtagcgatcaatatgttaacaatgaccaatagaatagctcgccaatctcctccggtagccaaatacgcgccgattggtgccggtaaagtccatggtggttgcacaaacatcaagtgcacccaaccagctttaaataccagccaagtaaccgttgtcatcaaaatcggtgctaacacaaaaggaacaaagaatatcggatttagcatgattggaaatccaaaaatcactggctcattgatattgaagatgcttggaatcagacaagctcgactaatggacttggtatacttggcttttccaaaaagaatcgcgcaaataatcaagccaattgtcgcgccagatcctccaatccaaatgaaccattgaaagaatgtttctggagcaatatgggtaggggtttgatggtttgcaactttttcggcattctcagtaaaaaattgaagccaaatcggacgtgccactgagccaacgatcgagtcaccatgaatcccaaaaagccagaaaaaagtaaccaagaaaactggaactaggacccctaagaaagtatctcctgcttttactaaaggtgaaaaaagagtttgaatcacttgttcaatattcactttaaagacaacattaatcgttccaatcactatgataataattgctgctggaattacggcctcaaaggagcgtgcgacagagctagggacttgttccggcattttaaacataatctttttggttttacaaaatcgtaaaacttcaaccgcaaaaatggctaaaaccatacacgggaaaatccccactgatccgagtgattccattggcaacatcaatccttgatcgaactgtaccggcataatacttaatagaaaagctgccaccgataattgtgctccggtcaaaggatctaactgataacttttcgctaaattgtatccgattccaaaacaaatatacagagacataatccaaaatgtcatccgatagggaattagaatttccgtaatgtgatctgttgcccattggtgaattgcccagttttctggaacaggtggaaaagcaatgatcagaaagaaactaccaacaataataaacggaatcgccgaaacaaccccatcacgaagcgctcgaagatgtcgttgctaagagatcttcgacattggtaacgcaaccttgtcctctagcatttcaaagaaatgattcatttttatcctccttttctcaactcaaactttcaataattttcaagagattcttgccacctaacggactgtaatctgtgggtttgatcaattcaataggaatatgtgcttcatctgcggactgtttaaacaagctaaagcgatgctttacttgtggggctacaaaaataatgtcccaatctttttcttggataactgaatccgcctcaccacttcctactgcagaacttgttagagcaattccttttttttcggcttctttgtctagcgctttttctacaattgcactagacatcccaccagaacagataaatagaacttttttcatttgatttactctcccttcttattcttttcaataaaagaacgataccaataaaagctatctttcttgtatctacggtaatctccattcccctcattatcagcatcaacataaatgacaccatagcgtttatccatctcacagctgcctgcggatacaatatcaatgatcccccaagcaatatacgcaataacgttgacctgatcgatatctctagctttaactatttcagcaaagtgctctttgaaataatcaattctgtaggaatcatgaattgtgccatctgcctcgagttgatctttcgcaccgaagccattttcagcgattataactggttttctatagcggtcataaactttatttaatgttgttcgcataccgataggatcaatttgccatccccaatcacttgcttttaagtaaggatttttcgttgtaactactaaattccctgcagttttttctgcttcctcggtcgttaccacactggaagaataataagaaaaagaaacaaagtcgcaagtatattccttcagaatctggcgatcttctgcggttatatctagatcaacagaatttttctcaaaaaaagaatgcatataataggggtattccccttgcataagcacatcactgcaaaaccactgattaatctgttcctctttcactaatttcaaattatcttctggttttggtgtcaacggataatagcagaaacacgacaccatggaaccaaagattccaggaatatccatttttcgtgccagctgaatcgtttttgcatttgcaacaaattgataatgtagtgcttgaaatacatcttgatagatatagtcaccattgcttggtttgattaatcctgtaccgttatagggactaaaaaagccggcattaatttcattaaatggcaaccaaaaatccacttgatttccccatcgagacaaaacaaactctgcaaaagagaggtaatggtcaatcatttcacgattcttccacccaccgatgctttccaccaaataaagtggcaccgcataatgattcattgtcaaaaaaattttgattcctttcttctttaattcccgaaaaatcgaatcataatatgccacaccttgttcatttggttgctcttcattccccagtggaaataatcgtgaccagctaatcgagaaacgatataaatcaatccctaactcgcttagcagctgtagatcttcctcccagttttcgtatcctttcgtcccttttctaaacggataaaattgggtagtttctgattcttttgcttcattgatcacctcttgagtcaacaatcgcgtttggattgttgcattattacttcgaggaagatagggacggcaatcttgtgtatctatccctttcccatccttatatccaccttcatattgactagctgcggttgcaccgccccagtaaaacgttctcaatagtattcactgcctttctctttgtgacagcttcattatagaccttctgattatttttttcaatattttattaaatattttgattatttttttcaaaaagagatttttcatatgaaagaaacattcaaaattaaaaaaaaaccgcttcgcaaaaagcgaagcgatttgactagttgattaattttctacttctatcagaacttctgtgcgactatctttgatcaaaaataatcccgtgaacaatagcagtcccgaagcgacggtcatgactaaaaacgaaacattcatgccgtggagcaaagcggcggagccagtcaatgtatgactgttgcgggcgaccgtattcatgatcccaacaaaaacagctgtgccgatggcgccggcgaccgtccgcagcgatgtcagtaatgcggtaccatgagcagtcaattctggcgggatatttttattgccccaggtaacaaatggcatcaataaacagcccgtggcggcacagcgtaaaatattcaggcagaccgccatccaaattcctgtgtgtatatgaataaaaaacataccgatattacttaaaactaacgaactgccgccaatgatcgttatgatgcggataccgactttgtcatagatacggccagcgataggactcaaaaaggcagaaactaacgaacctggcaataccaccaaccctgagattgttgcagattttccaagaatggattgtacatacaagggcatcagcattgaagagcccattaaaacaagatagagtaaaatactcccaaacacacttagcgcatactctttcgttttgaggacccgcagatccaagaagggcactgccgctttcatttggcggtgggcaaataagatgccgccaatcaaacctatgagcaatgcacccaagacagggagactggcaaagccataggttcctagattcccgaatcctaatgtgaagccgccaaaagtcacagcgctgagtaaaaaggagagcagatcaaattttttcttcgttacatccaagacatcttcaaagacattcaacgcccaaatcaacgaaacaaaaacaatggcaccgacaatataaaaaatggcatgccagttcaatttatcaacgatcattccagctaatgtaggggcgatcactggtgcggcagtgatcgataacccataccaacccatgattgcaccaattcgatccattggatagatcgtcaatagaatcacttgagccattgagatcaaaataccattaccaatggcttggaggatacgagacatcatcataatggggaagttcggtgctaacgcacatagaaccatcccaataagagcgattaccaatgcggaaagatataattttttggtaggtacccgattcatcaaaaaagcggtcaacggcatgacgatagccatggcgagggaatagccgctggtcagccactgtccagtggtcacagaaatttgcaagtcggccacgatggccggtaatgcggtggtcaatgcggtggataacatcgttagtgcgatacaagtaagaatcagattaataaaaataaaggttcttttacggtttgtcagattactcggttggttcaatagattccgcctccatgcgttggtaataagcttcaattttttctaacccgcgaccaaaggcttgtttttcttcttctgttagatcggtcagcatatcttggtgtgctttgctgcgtttttgtttcatcgcagcagcttcagctcttccttctttcgttaatgagatcaactggattcgtttatcttgcggagatgtttcttttttgatccagccttttttctccattttttttaagagctcccctgctgatgtcgagcggatcgccaaataggcggctaagtctttctgattcagtgtgccgcgctcgtccaaaactaacaaacagttgaactgtccccgcccaggcatgaagggaccatattttctttcagaataacgacgattcaatttatacacttcaaaaaaccgttcaacgatcttttgctctgagtaagacatatgtattgctccttttttgttcattaaaaccaattaaataggtacctacttaacagactgctctctattttacataggtacctatctattgtcaaggttacttctacatacaaaaaaagcatttctctccttggagagaaatgctcagttatttgtgctcctcagcagcatcagatacttcttcagacaatgttcccgcagctttattagcatgaaactctgctagaagtctgcgaacttcatctgtcgacttagttgtcatcaattgtgcgcgcaaatcgctcgccccaggaaatcctttgacataaatcttaaagaagcgatgcaatccggcaatggatcggggaaccatcgtagcataatggtcttgcaggtctagctgcaattgcagcaaccctaataattcctccgatgagtgttcttttggttctttctcaaaggcatagggatttttgaaaatgccccgtccaatcatgattccgtctacgccatactgttgggctaacgctagtcctgcttgacgatctggaatatcgccattgatagtgatcaatgtttgaggtgccactcgatcacgaatcgctagaacttctgggatcagatcccaatgggcagggactttactcatctctttgcgggtccgcaaatgaacagaaagattggcaatgtcttgctgcaacaagtgagtgatccaagcttccatctcagccatttctgtgtagccgatccgtgttttgacgctgactggcaacccacctgcttttgccgcttcaatcaactcagccgccacatcgggacgcaagatcaagccgctgcctttgccgcgaccggcaacatttgggacaggacaacccatattgatatcgatccctttaaatcccatttccgccattccaatactcatttgccggaaaaattccggcttgtctccccaaatatgggcgacgatcggttgctcgtcttctgtgaatgtcaggcgaccacgaacactctcgatcccatctggatggcagtaactatctgaattggtaaattccgtaaagaagacatctggcgcccctgctgtctgcacaacatggcggaacactacatctgtcacatcttccattggtgctaaaataaaaaaaggcttcggtaactccgcccaaaaatttgttgtcatgctttccgctccatttcttagtgaccggatcacttctttgatccaacttacaaaaacatagtcattatactaggaataagcaaaagaagcaaaaagcgagaccatccgcactcatggtctcgcttcttgtttcattactcgatagacgcctaatgcaccgatttcgcataaaaagatcagtaacgctagtggaagataggtatgactgcccatgatacccactagcggcgtacagatgatcccgatgctgtacatgccgatccctaagatcgaggaagcgaccccagcgtgttcaccttgccgatccatcgctaatgtagttaccaccgaattgacgatccctaatgtcgccacgactagaaatagtccaatgatcgctaatacaatcgaatttctgatgccactcagcatcaccagtacactgccgataaaaccgatcaccaatccgctgcctaattgctggactagggataatcgccgcgataaaatccccgaaagctccgctgtcacaatgataccaatcccgttgataccatataagagactatacatttgatcgctgagcccatagacattttggaacatgaaagaggatcctgaaatataactaaacaatgcaccataaataaatccttggataagcaccagtaacacaaagatgcgatcagacaatactgcctgccagccagattccatctgatggatgtgttcttgcggctgtaatgtttcctgatagccaaagagaataccaagcaatagcaggatgcctaaaccacccaaaaaaagaaaaatcgtttgccaagaagccactgccaaaatcgcactgcctagcagtggggaaatgatcgggaaaataccgttcactgcaatcagcatcgcaaaaaacttcgtcagccgttcgccggtaaataaatctttcgcaatcgcacgggtcaaaacgatccctgcggaactggcgattccttgcaagagacgcaaagctaggaataaccagatatttcgcacgaagggaacaagtaaacagcaaagaatcgctacggttatccctatagcaagaggtttcttgcgcccaatccggtcactaagtgttccgattgccaatggacctaatgctaaaccaatcagacacatggtcaagctcatttgtgtgagagaagcactgattcctaattcttcttgaatgactggaaaagccggtaaataagcatccattagtaaagggccataggcgctcaatgtgccaagcaataaggaaagccatatgatcctaccttttgataactccatttttccttctcctttcctatctaaaaaacctacctctagaatactagctgattccgtggtgattttcaatgagaatttttcttaatttcagatatttttaaacaactaaaacaattcgattggatatggctttttttttagtttttggttctaagaagctttaaagacaatagggcgtttcacccttcaattcctaacagatctcgaaaaaagcttattgccttctccctacaaaaaaactagtagtaagaaaacaataagcgtttcacatgaagataattattgagtgatttgatccatgaaaagccagtggcagtttttcagcgatcatttttacttactcatcgtgttgaatctggtacattaactgatcaagcaatggacgataatctacttgctgatagtctgtgacatcaaattcatagagcgttcccaaagcaaattcagcgtactttcgttcattgatgattcgtcggaattcttcctttgtaatatgattggttcctaatgaacggtcttctaaactatcaccataatgataatgatccatgatatagctcaaatgccgttccggctcccgatctcgctggtaacgccgttcccacaacacgtcgaaatcagccagcgaatcgtgattacttcataagcataagtatcagcaaggtctcgcaagcgtcctttttgcttctcgctaaatggatactccgaaacaatgacttttttccccgcttccatatataactctaacgtgcgataaaagaacggatagtgacactgaatggttcgaatcgaaaagggcgaatacctttctcctttattacccatttagtaagaaacaagttaaagcggataaaccaaaagatgctgcggtcctttgggtcccattttctcttcaccactatctacaaaacccacagaataatacagtttttttgctgcactattttttttattgactgctagaacaatttgtttcattgctggaaaatgagtttttacaaaatcaggcaataatcgcaatgcttcttttgcatatcccctccttagaaatctcgcatcagtagagaaactccgcaacaaaagagcgtcattttcatccgtatagtctgctttttggggtcctgcatccaaaacaaaaaaagtgaccagtttctgttgggaaaaagccaagatcgaatgatgctggggattcttttgggaaagtgcaatattctcttgtggcgtccctgtgaaataggtcatttcgtcagtcagaaaataattggtaacagcttctttgtattcctctcggtattccattaactccatcttttatgcacactccttctggtctagagcaataacccgctcatttgtaagtcattttatcaattattgcttgaaattacgaataaagtcatatacctgatcgttacacaggtatatgacttacagacaggtccaaaatcaggcttcttattgttcaatcgccgaatgattcattaaacgattgatatggacacctagaaaaacgatctcattctcagggattttcgtttgatattcattatctacatacgcctttacctttgttgcaatctccatagcatttgggtaaagggcccacatttgccgatacagtccttcgtctttttcttgcaataatccttctgtaaagaaacgatctacaaaaaaacggacatgtgtgataaagcggctataatgaatcgaatttgtattcacatcttgctggatcgaatagcggacaaggtttacgataatcccaatcaatttcgctttcttcaacccatcctgattatccgcagacgcagattgggcattgatcaaatgaaaagcaatatttgatgcttcttcttctggaagaaagatttgatacttttcacgtaacaaaagtaacgcttgttctgcaactgcgtattcttttgcataatagtttttgatttcccaatacaaacgattggtgatacttaaccccttctcttggcgttcaacagcaaaatgcaagtgatccgacaacgttaaatagatcgtagagtttagcggattgggcattaactgttgggccaattgaacgatttctttcgtcatctcaaaaaacctaatgggtatctcatcaattaattcagcaaactgcagagatctcgtttcatcaattgggagaaatacttgatcaatttgagaatccgttatctgctctccggcttttttcccaaatccaatgccttttccaagtgcaatcatttcttggccttcattgtcaacaagtacaacacttgaatttaagactttcttgatataaatcatgcactatcgctccttcgtcattctcctgctaggattgcgccattagtctcaatcacttttttgtaccagtcaaaagagtcttttttggatcgatcataagtgccatgtccttcatcatctgcatccacataaataaagccatatcgttttgacagttgggaggtaccagcactaactaaatcgattggtgcccagcttgtataaccaatcagatctacgccctcatcaatcgcttctttcatttgtttaaaatgcgcttcgaaatagtccctacgatacggatcatgaacgttcccctcttcaaggatatcttttgctcccattccattttcgacgatcatcaatggaatttggtagcgatcatataactcgatcagcgaaatctttagtcctttaggatcaatctgccagccccattcagtggatggtaatttaggatttttcacccctagtacagtatttcctggtgttcgttctgcttgcggatccccagattccgccatagacatataatagctgaaagaaagaaaatccactgtataatcttttagtatttgaggatcttccggtgccatttcaatcttgatgccacgtttttccaagtctcgcaaaattaagcgagggtattctccttttacttgaacatctgcataaaaattattctctaggttcttcttcaatgtcaattccacgtctagtggatcacaggttaacggataagtcattaattttgttatcatacagcctattttgttttgaggatttttttcgtgtgcaacttttgtaactagtgaactagcgacaaattgatgatgcaaggcttgatagatctcttgatgctctttccccggagtacattgttcaggaataattccagctgttgtaaagggatgacgatgaatgctgtcgatctcattaaaggtcagccagtattctacgtattccccaaattcctcaaagcagactgtggcaaatcggacaaagtcagcgataactttgcgttcaacccaaccattatatttcaaactcaacgcgactggcatttcataatgagaaagtgtcacgatcggtttgattcctaaacgctgcatttcttgaaagacatttcgataaaaagcaatgcccgactcatttggctccagttcttctcctgttggaaataatctcgtccatgcaatcgataagcgtagtactttgaaacccatctcagcaaataacgccaaatcttctttgtaacgatgataaaaatcgattccccgacgtttaggataaatcgtgtctgttggatcagcgattgcttctttcacggcgtttaccgtcacatgcatatgggctgcaaaatttttggtgtcgacatctggtttatacgtggcgatatctgctacagacaaccctttcccgtctaaattccacccaccttccacttgattggcagcaatcgctccgccccataaaaaattctctggaaatgttgattgactcatagttgtattctccttcacgttttttgattatgctgcttgaattttacgaaacaaatggagagatggataaaacaccctcgcttttagacatattttctgtttgttcaattggtttgataatgaaattttctttgttagtcacaacgcagataacagtcgggtcataccctgcttgtttgatggcttctaaatcgaattgaagcaatggttgtccttttttgacataatcccccgcactgacaagcggtgtgaaatattttccttctaattgcaccgtgtcgatccctatatggaataggatttcagcaccattctgggtctttaagccaatcgcatggttggtttcaaacaacatagtaacttctccatcctctggtgctgttagttcgccagatgtggggataataccgaatccctcaccaatcattccgctggaaaagacatcgtcttttatttcggctagcttaacaacttgtcccgcaacaggctgactgagaacttctgattgagggtcttcttttccttcaacggcctccatgactttatctttaaaaagaaacaggactaaaacaaaagccgcaagaaaagagactgctaaagtgactaatgcccaaactaaattcatactatttgattcatcaacgaacatggtgatactagcaagacccggacccactaatgcaaacgctttgattgtaaagatgccagcaactgctccaccaaccaaactagaagccatcaccccatataatacccgtttgtttaaaatcgttaccccatacaatgctggctctgtaatgccaaacagtgcagaaattccagcagaaatagctgttgagcgaagcttttgatcttttgtccgcagactgacagcaaaacatgccccagcttcagcaatattatgggcaagtgaagccggtaaataaagcaattctgcccccatctcgctcatggaagagaccgcataagggatcattgctttgtgcataccggtcacaaccatcaatggtaacacagctgctaagatacctgttgcaacccagcctagatgagtataaagccaaataatcgctgcagagaaaactgtacctacctcaaatcctaaaggtcctaaaatcaatagcgccactggaactgtgattactagactcatcatcggaacaaagaagatgcgaatcggttttggagaaaaacgagtaaatagtttttcgacttgcgaataaaacaaaaccgttaaaattgcaggaaaaacttgtgatgcataggcaatattctgtaatccgatccccaaaaaggttgctccatctgtcagcaacgctgttatttcaggcaaaatcagcgccccgactgctgaaacagccactaattgatttacttttaatttatttgccgtggtcatagcgactaaaatcggtaaaaagtaaaggggggctccacctataagatttaaaatttgatacgtttggctttgattatcaagcactcctgtaacagaagcgagtaacagtagtgattttaaaacaccacctccggcaaccgccggtataagtggctgaaaaatggaaataacaaaatccaacaggacagctccccaagactgctttgttgcacttccgctgtccgcattgtctaactgatgccccaacagtgacatcacttcgtcataaacttccacaacatcattgccaatgataacttgacactggacattctgccggactccgatgacaccctccactttttctagtgcttctttttgaactagagcatgatctttcagggtaaaccgtaacctcgttgaacaatgttccaaatgagagatgttttcttttccgccaatcaattggatgatggcagttgccgtttcctttacattcattgtttttttctcctttagattatttttctcttcgttggccaaacaaagaaaaaagcagacaacacctattaaaacaaccaaatgaatcagaacgattcactcattgctttatataggtcctgcctgcttaaccagtcacatgcctgtttattaattgcataataccacgaagaaattggaaacgcaaccactatttttgatccataagtttgccaccacagccaaatgtaaaacggttctgttgcaaagttttaaatctactatcagataaggtagaataatagaaaaagatagcaggaggaatgacgatgagtcattttaaaggaaagcaatttcagcaggatgtgattattgtagccgtgggctactatcttcgttataaccttagctatcgtgaagttcaagaaatcttatatgatcgtggcattaacgtttctcatacgacgatttatcgttgggtgcaagaatatggcaaactactctatcaaatttggaaaaagaaaaataaaaaatccttttattcatggaaaatggatgaaacgtacatcaaaattaaaggaaaatggcattatttgtatcgagccatcgatgcagatggtttaaccttggatatttggttacgtaaaaaacgggacacacaagcagcctatgcttttcttaagcggttagtgaagcagtttgatgaaccgaaggttgtagtcacagataaagccccctctattacaagtgcctttaagaaactaaaagaatacggcttttatcaagggacagaacatcgtaccattaaatacctgaataatttgattgaacaagaccatcgtccagtaaagagacgcaataaattctatcgaagtttacgcactgcctctaccacgattaaaggcatggaagccattcgaggattatataagaaaacccgaaaagaaggcactctcttcgggttttcggtctgtactgaaatcaaggtattattgggaatcccagcttaaatcatagataccgtaagggattttattctttatttaaaactttgcaacagaaccccattttgtatgactaccaacaccattttgtatgactaccaacaccattttgtatgactaccaacaccattttgtatgactactaacactacctgtttacatttaggttagtgtttgttatatttttaatgtgaggggggaaaggaatggacaagaaaacggatttagcagttagatatcaaaatgaattgaaccttgtgcctttaaaagaatttaacgctaaagaaatggatttgttctttgcattatgtgctcgtatgaaagagcgtggactagacaatgtgcgcttttcttttgaagagttgaaagaattgagtgaatataagtttactggtaatgatagattcgttcatgatttggagaatgtctatcaaaaaatgataagtatgtcttaccgtacggatgagatcaatgaagatggcgaccgagttatcaaacgtttcgtattgtttacagggtttgaaattaatgtctctaaaatgtttgtcgatgtgagtgttaatccaaaactggactacattatcaatggtttaactactgaggtttctaggtttaaattatctgctttcacttcgattcgctctacctatgcaaaaacattattccgattgcttatgcaatatcgctctactggttattatattgtgagaattgaagattttaaagaacgaatggatattcctgagagctatcgccaaatgggacaaatcgatcaaaaagttttacagcctgcactaagggaattacaaaactatttcagtgacctaaaggtcgcaaaaatcaaagcaaaaaaaggcaataaaattgccaaactggagtttacgttttcaggtctaaagactgatacaccaaagattccaatgcatgactggacaaaataaaaaaagaacttgccctctcacatttaagcaagttaggcaagtccgtacgcaaccctcgaagattgttagtttattctaacatatgcgtgcggacttctaaaataaattatttttttggaggtcatatcatgacaaaaagcaacgattccacctcttacaacgccaagtaaaagcccaacgatccaaacagcggtagaaaaaggtaaggctgctgatcaatcgcaacgactaagcaatccgactgtatctggaggaaattcttctaccagcagtcaaagaaccaatgatcaagctgtgaaacgctcgacacctaaaacgatttacggcacttctacaagtggtatcgtacaaaaaaatagccaatcggctgctaacactggcaacaaaacaatgccacaaacaccaagtcgagggcttgatcaatcaattgcgacaccaaggaaacaaaacgttccagaatcgactacaagaaaaccaacgtcacaaaaggcaactacgtcaaactatcaagtgccaacgttggaatcgaaaatcaaagagccttcttcacctgaagaagtggctcataaattattgaccgaatctagtgtgaagccagataactcttattacgatatttaccaatcgatggataaagtgaaagctgaagactttatctgacgaatgaaagagtagaaaaacaacgtgaggaaagaaggaatttctttgacaaaggaaaaattacaagtatatatcgacattgaacatagggacgctttggaagaattgaaaacctatttacctgtcgaagagacaataaatgatagtgcgctgatgcgatttatcataatcgatttgcttaatcgcatacgaaaagaagaattatttgaaaaaaaaatattagattcattgtctgttttgaccgtaatgacaaacgcaaaattggaacaagatcacaccaaaatacaagatttattttcttccaacgtataccaagaggcagtatcaatgagcaaaaaaactgtgcgaaatgaaaattatcggttcaagaataagaaaaaaattcagactaatcaagaaacaaaagacaacaatatcgtacaagaagatacaaaaaaaggactcagtttcaacgaaattgttgctcaataccttccaaaaaactaatagtgttcgggtattttttctaaaggaaaaagtaatgttgaaagtagtcatgaagtagtcaaaatagctaaaatgactacctgagtagtcgtattagtattcatgtgagaatactaaaaacgaggtaatgatatcactttgaaatctcttaaaacccaataggcacagcctattttcctccttctaactagaaggtgggggtatctaccttatgctcttctttatttcgagctattctatcggacttgcaatctataatcaatgatctaagttccgattaagaacttactgaaggaggaaactatgaaagaaattgttgttcgattcgagcatgatgaaacattaacgtatcttactagaagagcaaaagaattgtccgaacggtcagggaaaaaaatctcaaggaatcaattaattaacatgattattgaagatgatatgaaaaattttttatctcaaaatagagaagtcgatatgcttaaagatagtttggaggacttcaaacacattttacaacaatacattgacacgaataatggataggctacaattaactagacagaaaaattaaggtgtgtagactagaagaaaacataccaggaggaatttttatgtctaagagaacacgaagaactttttcacaagaattcaagcaacaaatcgtcaatctttacttagctggaaagccacgtgtagaaatcattcgagaatatgaactaacggcttcagcatttgacaaatgggtaaagcaatctaaaacgagtggttcattcaaagaaaaagataatcttacgcctgaacaaaaagaattgttagaactacgtaaaagaaaccagcaattagaaatggaaaatgatattttaaagcaagcagcgctgatattcggacgaagagacaagtaatcgatgcgaataagcatctttaccctatatcagcgatgtgcagaatattaggtctatcacgtcagtcctattattatcaatcaaaaccaaagaaagatgaatcagaacttgaagaagtagtcgctgaagaatttatccgcagccgaaaggcctacggctcaagaaaaataaaaaaagccttatcaaaacgaggcattcagatcagccgacgaaaaattagtagaatcatgaaaaatagaggattaaaatcgagctatactgttgcttattttaaagtacatcattctatttgcaatgaagccaaaacgacaaacgtattgaatcgtaaattcttaagagacaacccattagaagcgatcgtaacagacttgacttatgtacgagtcgggaaaaaatggaattatgtctgtttcattttggatctgttcaatcgagaaattctcggctattcttgtggagaacataaagatgccgttctagtaaaaaaagcatttagccgtatcaaacaacctctgacagaggttgagatttttcatactgatcgtggaaaagagtttgataaccaagctattgatgaattattaacaacttttgacatcaatcgatcattaagtcataaaggctgtccttttgataatgccgtagctgaatcaacttataagtcgttgaaagtagaatttgtctatcaatacacatttgaaaccttacaacaattggatttggagttatttgactatgtcaattggtggaaccaccttcggttgcacggtacacttggctacgagacaccggttggttaccgtaaccagagattggcgcagcgaatccttgataatgagctcggatgtgctaacgctagcgaggcagtctaactttaactgttagcccctgccgaagatcgtcacatccgaggaggctcattgtcaaggacaatcggaatagcatacggaaagaagttctgcaccttataaaatttgtcaaaaaaactgttaccattccaataatgcgctcttgtatcgagcctttgaagccgatggtatttagttacttaagattcttgattttgattttttaatccttccttgctataataaacgtgcgaagtgatatcaagaacaaagcatatttacaccaaaaagccctcctactgcgaataggagggcttttttttgcgctgttgcgactcagcgttggtgccagaaggcaactgcttcgattatcggctaatcgtctagccagcgatcaaatagtattaatactattcccacaagaagtggtgcgataatcagtgatatcaaggtctcaaacatatttacaccccctctcggggcagttgccataaatgagtatagcatacccgcccctatagactattttgatccttgcatattttaatatagcactcagatcctatatgcgaccccctcgtaataaaaagtttgtcccacgtttaatttaaggtgttaggactttacatgaccacttttaagacgccttaaaagaaatcgataatcaaatcaaattcatgtatactaaaagaaaaaagcaactgaggtgacaaccttttgacaacggatagacaaccaaaagaaatgttgacagtaaaagaacttgcagaattttttggtatcagtagacaagccatgaggaaacatgttgacaacctagagccaacgttccttgccaaaaatagcctaggatacaagacagtgctatggtcgggagtgttgcaccttgctgacaagctaggacgtcccgagttgcttgaagcgttcgaaattcctgacacagcaagctctgacagtatagaaacgaagttgcttgcacaattgcaacaaaaggacgtacaaattgatcagctgcagtcattattagcccaacaacagaaacttcttgatcagcaacaacaactaactttgcaagcaaacaaacaaatactgcttctgacgtcacaggaacgcttctcagacgatttaaacaaagaatcgaataataatactaaaaaaattaaaacgcctcagagcggttatgagagcccctcagaacataaaggaaactttgctcctgaaaatgaagtcgtgcgaccgaaacaagaaagacagaagaagtggtggcactttttccgtgaaccctaagatagcgttgaaaggatgaatggtgtatgtcgttttcagcttatgttgacagctatcctgtgactgcgtatatcgtggggcaccttggtttatcagtgggtgatttttgtcgacggtatgaattcgatcccacgatcgtcacggggtggcaaacagcggaacaagtccgctgcattttacgcttgttagaaaagcaacattttgcttatcttgcgaagaatccagcgtggaacataacactgtctttactcgcccccccggtttcttcacaaacgacccaaagagaagaagcttgatttaccagtattttaggttcccaacatagctagaccaattgaaaatcacaaagaacgcccgtcaatcgcttgattgacgggcgtcttgtgttaatcgagattatgttaactaagggtttaaataacttcttctagccaaactttatatgaaagatccgaagcaattgacgtttgtatttcaggactaactatgaatccgtactcttcttcacttgtttcaaaaccatacataacgtctgaaatcttatacaattgcccattccataggattttttccccttttcttggaataaatggtagcgccacaatatcaaatttttcagagtagttttcactgtttttgtttaaggtaatagctaattcaatcgcgtacaattttcatatcctccaaaaatattaattaattgaaaccacacgtacaggagaaaaacaacttgcatttccctttgaagtataaatttgagcaaccccatttattctataagttcctccttttttatacgtccaagtttgagaaatagtcacaccaccagattttggggaatagcttcccggagaagtcgtttgtcccaaaattccaatattataaacagcgttcactcggttaattatagcatttgttttcaatttccaaacagctgtaacctttcttccactttttgtcaccgtaaaagaagtcgtagaccaaactggaccagccttagcttgagcttgtgtttggaaaatatcattgttattgattatactgtcagattcaaatattgctgaattcgattctacaataacctgttcctcagcttgaacatttactccaaatgcaataaccataaaagctgttaaggtcaatcctacaagaactgctctaataatttttttcataaataaattctcctattcctttggtagtctcaatgtatagtttttatcaaatcttgtatataacacatctgtttactccgtagcaacgaagttagcgttgttttaagttagtttgttgcattcttatcactcggaaaaaaagtgcaattatgacgtatacgatcagaacagatatgaaataaaccgctaaatcaatttgtactttcttccacatgctaggtaacaaaattaagaatctattctctagaaaaccatcgtaacttcgatacgtaataaatggaactggaaagcccattaagtaactcgtcatgccatctgaggtattctccctaggatttaacacaaaagcgcttatcagaggaattataagactaataataaaccatttaatatttaacctttttttcatgatgatcttcccctaaaataatagatttaaattttatgtgagaaattccaagtatcattgatttttgcgccaatcgtaaatccttttacttgaaatcctaataatgaataaccgtttacttttatttttactgtgtctttagtgttatttgtttttacaaaatttgaagatgcactggtttgattccaagtaacagcaatttgtaagcctgaatagtaagatttaattcctgaaaccttagtaaattgatttttaccatttacttttttgtattcataattgaaggatacatttctccaagtaggaagtccagtcattccatagccactaaacggagcccattgagagactgttttacttccagcagctctggtttgtatagggttctcattaattgtaaattctgtttcactgctatttttaaactctgctagaattttttctaattcttctacactgtctaattgaataatattttgcggatcaatatcttctgcgggtactacttcgaaatcgtatttaccgctttcttcaagttcttttacttcactgataactgcattttcttcggtaacactatcagctgatacaatatccttccacccaaaaaaaacaacaaacattaatcccactaaaataacttttttcataacatatagcctccatttaatttgattttttaacgcgaatttctagtatattatccataattcccgcttaaaacataagaaacgcatagtttacatagggttgtatttgtaacttattcgtttacaagacctaataaggctaattatttggaaatttgatcctatttttatgtattttcctacttcttgcatttaaattgttttgcaaagttctcaaccgtgttgttttggggttgttagggcttgccctgaccgcctgtaaggcgttttgctaatataattacctttaagatctaaaaacgtcttagaaaggcttttacgagcaaccagaccctatcccaacccgactttatttaatgttttgattttagcgagtgaacgtagtgaacactgcaagcctaatgtgagagcgtagcgatcactcctttggggtcttgaaattaggtcttttggttgtggttctagtctttttgaatagtatgtgccacaaaaatatgcagtgtttagggtttaatctttactagctgtttattagattcgcgaagatgattacttgaaagagaaatgatgtatttgggcgggaaaaattacctgtggaaaaactcgcgcgcgcacgcgtttattttatatatcttttataagaccttttataaacccttttagggggctgttgcgccttactctcccaggcgatacagaatggtactaacaccattttgggttctgttgcaaagttttaaatctactatcagataaggtagaataatagaaaaagatagcaggaggaatgacgatgagtcattttaaaggaaagcaatttcagcaggatgtgattattgtagccgtgggctactatcttcgttataaccttagctatcgtgaagttcaagaaatcttatatgatcgtggcattaacgtttctcatacgacgatttatcgttgggtgcaagaatatggcaaactactctatcaaatttggaaaaagaaaaataaaaaatccttttattcatggaaaatggatgaaacgtacatcaaaattaaaggaaaatggcattatttgtatcgagccatcgatgcagatggtttaaccttggatatttggttacgtaaaaaacgggacacacaagcagcctatgcttttcttaagcggttagtgaagcagtttgatgaaccgaaggttgtagtcacagataaagccccctctattacaagtgcctttaagaaactaaaagaatacggcttttatcaagggacagaacatcgtaccattaaatacctgaataatttgattgaacaagaccatcgtccagtaaagagacgcaataaattctatcgaagtttacgcactgcctctaccacgattaaaggcatggaagccattcgaggattatataagaaaacccgaaaagaaggcactctcttcgggttttcggtctgtactgaaatcaaggtattattgggaatcccagcttaaatcatagataccgtaagggattttattctttatttaaaactttgcaacagaaccatcttttttgattcaagctcaacttgtcagtacctttgtcaattgatacagggaatgcctaacatggtgtgtgtgaccaacggtctacggaacgcttttatactcaacgaagatcaaagcctgaggacacgagtatatatgctgggtggcgaacttaagccaggtgcagcttctattacctcctttacagacacgaactctctaacagaacaatttgtctatgatttttctttcttttcttgtcgtggaatcgacctagacggggtttatgaagctagcttgggacaagctaaaatcaaacaacaaataatgagacggtcaaaacattctattttactagttgatgaacacaaatttgactcgcctcacttttacaaaattgctgatttcgctgattctcactcagtaataacaaatactttaccgacagaagattatcaaaagagaatcgatgatggaatcactaattttatttggttgaacccgaaacttaggagccaaccaaatgaatagtaattgagcctcataaaaaaaggcaatccacctcagatggattgcctttttaatataaatatcattaattaatatcgtttcctttcgtacctcaacagctgagtattgtccacattgaatttcaagaagtcaatcatcgtcttcccatgaaaataattgtcaatcacccgaatcaaggcattgtgacacaccaacaaaacatcttcgtcactttgttccaactctgccagcaaaggatacacccgaccggcaacatccatgatggattcgccgtctggtaatggtagcgagaattccacacgaaccttttggaattccggtgtttcaattggtaagccatcatactgtccaaaatccatctcaattaggcgcggttccacctcaatgggtaccgacactttttcattaatgattcgggccgtttcctgggcccgcctcaatggtgagacatagattttagtgattggctgctccaagtcgctgaccaattgagccaattcctctgcttgagcataaccgacttccgtcagctcaatatccgcatgaccgcaaattttgccgtccacattatattgggtctgaccatgacgtgctacgtaaatcatcgggcactcccctttgcaagcggacgtttctcatccgccatttcacccagaaccagctctgaatcagtggccaattgttgtaaagccgccaccatctcagcttgcgatttgccaaagaccagggagaaagaattattcttactcttgtagaaggaaacaaaagagttgccaccagctaattcttcaatttgaatttgggggtagcgggcaaactcgccgttcaagacacctagtttaacgactccttcttgtgacaagccttcttttaagaaaccattgatcaggataatagcggcaaaagcccccagtttaattttatccgccagattacttggccaaaagattacaagtatcgctaccgtcaatgcgatactcaaacccatacgaatccagctggtttgagccgccacgataattttcttttgatcttttacttgtaagacgaccaacaatcctaaaaagcctgcaatcactagtgcttctgccattttctatcatcctttacttatttttaccactcggcgatggtgccgtcgtagtttttccattgtgggttggtccaaaccaaaccttcttgagaaatttccttaatgcggtcttcatccatttccaaaccaaggcctggtttagaaggtaggtcaacatagccgtctttgtattggaaaacttctttgtttttgacaaaatccaacaaatcaaagcctttattgtagtggatacccaagctttgttcttggataaagacatttggtgtacatgagtccacttgcaaggtagctgctaatgcaactggtccgtatggtgcatgtggtgccacggccatatcatgagcttcagccatagccgcaattttgcgggtttctaaaattccgccgcaaagggctacgtctggttggataatatcgatggcgccttgtttgaagatatttttaaactgccagcgagtgtacaaacgttcgccggttgctaaagggacagcaactgcatcggcaacttctttgtaatgctcttcattttccggcaagacaacttcttccaaaaacattgggtggaatggctccagggccttcgctagaactttagccattggtttatgcacccgaccgtggaaatccacaccgatatccatcgcgtcaccaaaacgttcccgaatggatgccacccgttcgacaacttcatccacttttttgtaagagtcgatatagtgcaattcttcggtagcattcattttaacggcagtaaagccacgatcaaaacggtcttgcgcttgttcagcgacttcacttggccggtcgccaccaatccacgaataaactttaatgttatcccgggcggctccgcctaataattcatagacagggacgttaaaggcttttcctttgatatcccacagcgccatttccaatccggaaacaatcgtcccattgatggggccaccacggaagaaggagcgatgcatttcttggaataagcgttcaatttcaaatggattacgcccaatcaaacgattaccgatctcataagcacccgcaacaactgtttcagtcttggttccggagatcatttccccccagccgtcaatgccttcatcggtggaaatcttcacgaagatccatcttggttttactttgtatactgtaatatctgaaattttcaatttaaaccctccaattattgtgcttctactggttcattcatttctcggttcacttttttcacaccgtcaaagtagtaccatacacctgccaataccaacaataagaccggaatcccgatgattggtttgtaggcaaaggcgatgaataccaaataactttggatcatggaagttgccgcaaatgatgagatcaacattgatgaagtacccaagtcgatacccactgatttagcaattgctgtcaacattggggatgttgcagaaccacaccatagcaatgaagcagtaatgactaaaccgatcacgatgtttttcaacaaattcccgcgagtcaaggcaaccaccatcgctacacggaaaggcacaacggccaaatcggcaaatggtaaaacgcggtttcctggcaagactaaggccatggcgattgttaaaggaataatgatcaatgctgttgtaataacatctggattcccaacgacaaccgctgcatccaatccgataaataaacgtgttcctttgaatttttcttgggaccatttttgagctgcatcagaaattggcatcagaccttccatgaacaatgaggtcattttaggaatcaaaaccaaaacggcggacatgctgacacctaattgcaagacggccttgatatcgtaaccggccaaagcaccaatcaccatcccaataaccagccccatgatcattgagtcaccgaagaacccaagatatttttgtgcatccttgatcgtgaatttcgatttgcggaataatggaatacgatccagtaaccagttcaacggccaagcaatcactaaggaagacaaggcggacacagttggcaaggaaacgcccggaattccaaagaagctttccaccatcggttgtgaccagtcggagattttaaaggtaacgattgccatcacaacagaggcaccaacacctaaaaacacatttttggtaacaaagtagaccatcaccccaacgatggccatgtggtggtaattccaaatatctacgtccaacgtatgggtacgtttcaaaaccaataaaacgatattaaccagtaagatggcgaaaatcaggattggaatgatgggtgatgcccacgtaactgcggcgattgaaccccaaccgacatccaacgcatccagcttaacaccggtccgttcaaccatagccttcgcagccgggccgacgttagtggtcataaagtccaaaatcaatttgattccggcaaaaccaatacccaacgtcaaacctgatttaaatgcacgggtaatctttaaaccaaagatcaacccgatgatggtaatgatgactggcaacataactgtcggtccagcatcgataaagaagttaaagacattcataatgattttcattttttcagctcctttaatccgctattatttcaataagttcaagatttcttccatcgttttgtcagcaccgattcctgtcaggataggcatgccttttaccactggcacattgccggtttgaccatcgaattgaccggttgtcaccaacaaatcatacccttcgactttgccgggcacttccattagtttggtttgggtagttgccacttcaactccgtgttcttgcaagtattctttaacctttgttgctaccactgttgatgttgcaataccgtttccacatgcgactaaaattcttttcatgataatttcctccgattgcgagctttccactcgtgattttttattttttaaaaaacggctttctttagtaaagccaataattctgtatcattgcgggcgtcaatcatttcctgacgcaatggttcatcttggatgatgccgactattttttgcaacatttccacttgcccatggggctcaccaattgccatcataatcacgatctgaattggtaattgagctttattgtcttccatattatggaaaagtaccggctcttttagcgtggcaatcgccaaagtcgttttattgaccatttcataatttgcgtggggaatagcaattcccgggggcgttgatggcaatcccgttgggtattctttttcccgatcttggattgcttggatgtactcctctttgacataccctttttgataaagttcacctgccagataggccaaaacttcactatctgttgaagcttcgacgtttcggaagacaagttcctcattcagataaagttccatactttccactccttgttcatatttcacctgtatatcgcccataatattaaatcgctgccagcaattctttcattgattgggcaagattcttaacattcaattcttcgatatcctgcttattgaacatcccggaacccaggcctaaataactggcgccgttttcaaaaaattctttggcgttttctttactgatgccaccgacacccatcaagggcaatttgccaagaggcgcttggatatctttgaaaaatctcggtgtaactactgctgctggaaaaactttgacgatgtccgccccttgggcaaacatttgattgacctctgacggtgtcatcgcagccggtactgccaatacacctttttcattggcgtaggccaacatttcctcagtaaacatgtgcgggcctaataagaatttggcaccagcttcgtaacaagcttttgcctgttctaaggttctaacggtgccggctccgatgtaggtcgtatccccgtagcgtttattcaactcacggatatgatcgatggctccttcagtattcatggtcatttccactgcaaattgatgatcaaattcctgcattgcttgtaaaatcgcatctgcttgatcaaacgtgtagccccgcataattacggtaaatcttggataatcagctaatttcattttttcctccttaagaactttgtcttaataattgatagatggttttttcatctgctgaagccaccaactgatcaatcaaagaatcatctttggcgatatcggcgatctgattgatagctcgtaaatgcttggttaaatcaaagaaggataatggcaaaatcaaactgatggcctccccattcggaaaaatcaccggtttttgacaaaccataatgctgacaccgtcattaatgacccctttatcaacagtggtatgcgggatgcaggttcgcatccccagataaccggcgtaaccgggttgtttgatttgattcacgcaatcattaataaagcgtgaatcgatgatctgatgatccaataatggttgacatgccagactgactgcctcttcccaagtcatctcctgatcgattacttgcacataatttggacgcaggtagtgagtcaaagaaggtaagacttggaaattatccaatggagtactttcatcttgtttcaccaagaagtattgcaactcttcccgcagagacgcttgatcgttgaccgtcgcatattttttgacgattttcaacaattcatccagcgcgcgatccaccttagtgatgcccaagtcacttaagactcggtagcgcaaactgatttgttcctgataagtcatgatgggatcaataatgaactgcatcatggcgctgtttaaaggtgttgtagtaaaaaccaagtcgtaatcgacttcaaacttgtaaaagtctcgcaccgataaggaagccaaaaaatgaatttcgggaaaaagtttttccatattggcccgtactaacttggaaaccataacgccgttggtacaaaccaccactgctcgtggccgctgtttgttcagcttgttatgactgcttaactggtagccgaaataataagacaacaaatccaattcgtcgttcggaaaggctttgttcagccaattctcgatgggaataatcaattctttcatcaagtcgatcaagattgcatggttgctgtctttgatcaggctatcgacagaatagacccccaaactcaagttaaagcggatccggaaactggccggtcgtaaatgacttaatatccgacgttcaaagtcttcgcgatcatcgatcataatcaaggtttggttttggaaattttccaccatttgactgatcaatttacgtaaatcttgatctgaatcgtagttctgggtggtcttactttcaaaaatattggaagtcaaaaataagagcgtgaaccattccaggtaactcttggataatttccaagccgtctcgccgactaaaatcgtcaacatccggtattccggtgtattactgacctcaccgggaaagaaatccggtttagtggatactttgatgccccggctgactaaaaaacgggccgccgtttgcaggtaatccaccgactcatcggaataactaaggtgtaacatttgttccatattgtgaaccagatggacaatttcttcttccgtcacgccatgaaccaacttgcctcggatggtttcccgacggaaaatcgggcactgcttcaccaaatcagataacagttgcaagattcggtgttccgatccagccaattgatacccgttaatccggtcgtattgaattgtcaaactgtagtttcttagtagggcgtcggttcgtttgatatcatccatgatggtagttttgctgacttctactatatccaacaaatgatccagactaacatattcgatattggtgatcaaagtcatcactatcagcgccccacgttctccctccgtcaatgccaacgttgcttgttcgtccaccgtttcctgatccaactgggacatcatttggatcacttcaatcggtactgtaatatcaccggagtgactacgctggatcgttgggatatttttcatctccaagtcttcattgaattggttgatggcatagttgatttgacgacgtgtcaaatcgagttcacttgtcaaagcggaaagtttcatttcagggtttttaataatcattttgagtatttcacgaattcgtttgttcatttgactatcctcctgacaaaatcattatatattcacgcaagcgctttttgacgacgctttcatcacgatatttgtcacactcacttttttagtttgtcacaccggtgtgacacagatagcataaccggcgttatatcaagtgtaccatggcgtgacaattatttgttacaccagaaaattagcgcaaaaaagaaacgacaaaccggaaaaataggtttgtcgtttcttcatatagtgtgttttattgtttagccttgcaaggtcaaattattaatctgggttctgttgcaaagttttcaaaagaatctattttaagttaaaattatagaaaagatagcttggaggaacgaagatgaagcatttcaaagggaaacaatttcaaaaagacgtgattattgtcgccgttggctattatcttcgttataacctcagctatcgagacgttcaagaaatactttatgatcgtggcattcatgtgtgtcatacaacgatttaccgttgggtacaagaatacggcaaagccctatatcaaatttggaaaaagaaaaatagacagtctttttattcgtggaaaatggatgaaacttatatcaaaatcaaagggacctggcactatttgtatcgcgcgatcgatgcagacggtttaacgctggacatttggctacgtaaaaaacgcgacacacaagcagcctacgcatttttaaaacgtcttagaaagcagtttggcgaaccaaaggttctagtcacagacaaggcaccatctattggcagtgcgtttaaaaaattacaaaaagctggtctgtatacgaagacagaacacagaacagttaagtatctcaataacttgattgagcaagatcatcgaccaatcaaacgtcggaataaattttatcgaagcttacgcactgcctcaataacgattaaaggcatggaaacgattcgcggaatatacaagaaaagccgaaaagagggcacactcttcggcttttcggtttgcactgaaatcaaggtcttattgggtatcccagcttaaaaagcagtcaaaacggaatgctggttgtttattttaaaactttgcaacagaaccatactaactaactgatgaaggaatcatgaaacgaacaagcaaaaaacaatcaaaattttttaaccctcatcgaacaattgtcctaataggggtagcgtcaggaaaatgcggatttacaacgataaggaatttccaatataaaaagcctgatttcccatcacctaaattgagaaattaggctcttttttcgttactccataaacagcattctattactgaatatgtaatttacttcgggataacagggacccagagttcgtgtcttggtttatgcttcggaccgtaataacattctatacacggtaaatttgcaagttcatactcggaggtagggacccactcggaatataaacgtttccatgcatccactatgttcggaaaaactgcccatgtacttgcgggaataataagcgtctccatattttctggggattccccatcgtatcttacgcccatgaaataggaaaattgttcatctgttatggcagcttcttttccgcaaacccccagaaggctttcaagcgtgcattttggattttcccatgacatatctactagttcttgcataaatccatcttttttcgcagtgttccaaagcgtagggattgttttaaatgctctgcttgtttttactggcttactttttccaacaattcttaattcaaaatcaaggttttcaattctgtactccatctcggtatctcctttaatagaaatttgaaaggaaattctgggaaaggcttttaactgtacccctctattacgagcattggaaggggttactccatgcattttttgaaaagcacgtgagaaagtatcagaagaaacataaccatatttaattgccacatcaatgatccgaatatcacttttttgaatttcaaatgctgcgagtgttaaccgtctacgtctaatatattctgatagcgatatacctgagattgaagagaacattcttgaaaaatgaaactcagaacaattagctgcttttgcaatctctttgtagtctatttcttcattcaagctattttcaatgtagtttaacgcattgttcattctttctagccaatccataagtttactccctttcaatatttactttaaaacaaaatagataataattgccgacatttcatgcctaaaaatgttggtatcaaaaaataaaacttttgatagaatcaggacggttctgttgcaaagttttaaataaagaataaaatcccttacggtatctatgatttaagctgggattcccaataataccttgatttcagtacagaccgaaaacccgaagagagtgccttcttttcgggttttcttatataatcctcgaatggcttccatgcctttaatcgtggtagaggcagtgcgtaaacttcgatagaatttattgcgtctctttactggacgatggtcttgttcaatcaaattattcaggtatttaatggtacgatgttctgtcccttgataaaagccgtattcttttagtttcttaaaggcacttgtaatagagggggctttatctgtgactacaaccttcggttcatcaaactgcttcactaaccgcttaagaaaagcataggctgcttgtgtgtcccgttttttacgtaaccaaatatccaaggttaaaccatctgcatcgatggctcgatacaaataatgccattttcctttaattttgatgtacgtttcatccattttccatgaataaaaggattttttatttttctttttccaaatttgatagagtagtttgccatattcttgcacccaacgataaatcgtcgtatgagaaacgttaatgccacgatcatataagatttcttgaacttcacgatagctaaggttataacgaagatagtagcccacggctacaataatcacatcctgctgaaattgctttcctttaaaatgattcatcgtcattcctcctgctatctttttctattattctaccttatttgatagtagatttaaaactttgcaacagaaccattgatttaatacgcaggaaaaaggcaagcttaaaatcactcaaggatacatggctagatttatcagaggataatccatacagccaattcttaattacagtaatggctggtgtgaaccaattagaacgagattttatccgtatgcgtcaacgagaagggattgagctggctaagaaagaagggaagtttaagggtcgtttaaagaaatatcataaaaatcacgcaggaatgaaatatgcagtaaaactatataaagaaggcggtatgactgtaaatcaaatttgcgaaattactaatgtgtctagggcttcattatatagaaggctatcggaaggaaacaaatagtttgtcctgatggttctgttgcaaagttttaaatctactatcaaataaggtagaataatagaaaaagatagcaggaggaatgacgatgaatcattttaaaggaaagcaatttcagcaggatgtgattattgtagccgtgggctactatcttcgttataaccttagctatcgtgaagttcaagaaatcttatatgatcgtggcattaacgtttctcatacgacgatttatcgttgggtgcaagaatatggcaaactactctatcaaatttggaaaaagaaaaataaaaaatccttttattcatggaaaatggatgaaacgtacatcaaaattaaaggaaaatggcattatttgtatcgagccatcgatgcagatggtttaaccttggatatttggttacgtaaaaaacgggacacacaagcagcctatgcttttcttaagcggttagtgaagcagtttgatgaaccgaaggttgtagtcacagataaagccccctctattacaagtgcctttaagaaactaaaagaatacggcttttatcaagggacagaacatcgtaccattaaatacctgaataatttgattgaacaagaccatcgtccagtaaagagacgcaataaattctatcgaagtttacgcactgcctctaccacgattaaaggcatggaagccattcgaggattatataagaaaacccgaaaagaaggcactctcttcgggttttcggtctgtactgaaatcaaggtattattgggaatcccagcttaaatcatagataccgtaagggattttattctttatttaaaactttgcaacagaaccgtctgcaataactaacaactttaacatctactcaccacctcatacttcatgatttgattatagggacaaaaatcaagcgtttacattctaaaaaaacgaaaaatcgtttaatttagaaacgatttcttaaaaaaaggatattttttatgttttacatgctattattgttcatatatgaaacaactatcaattgatggagggaaaagggatgaaacgaaagattttaggtattgcaccttatgaagaattaaatcattccatgcatatgatcggcgaacaatatccggaagtggaaacgaccatcttcaccgcagatctggtcgaaggacaaaatcttgccgctaaaatgtatactgatggctatgacgcgatcatttctcggggaggaaccgctaaactgattcgcaaagttgtatctttaccggtcattgatgtctcattatccatttatgatgttctaagttcgattcggctagcagaaaattatactcaaaattttgcgatcgtcggctatcccagcatcaccgaaaaagcccatttgctttgtgatcttttaggctacaagatcgagatccacaccatcgatgagaccattgatgccaatgagatccttgatgcattaacagaaaaaaactatgaattgatcttgtgtgatgccatcaccaaccgcatcgctcttttgaaatctctaaacacgattttgatcacttcaggattggaaagcatcaaaagtgcttatgaagatgctttgtcgatcattgatcacgtccagcaagtcaaacacaaaaaagagatcctcgaaaaagggatcttgagtcagcagcaagacttgctgctttatgatgatacgtataccattgaattttctacattagaaccagattttgcagaagagatcctcaaagttcttcaggccaaaccagaaaagaaagaaatccagcattactcgcaaacacaaaataagtatgtttccttattagtcaaaccgtatactgtcgatcagcagcattattacagctgcgctgttcaagagaatagcgcaccacccgtaaccaacaaactagatatcacttatcagaaaaaaacagaagtcgctgatagtttttcaaaaaagttattgttttcgcaatttatacctgaacgcgtcaaacaggaagtgaaaaaataccaagattactattcctcttatcttgtcttcggggagagcggtactgccaaacaaaatattgcttaccaaatttatctcaatcagtcccaaaataccaactacctgattacgatcaattgcaaactcgtcacagacaaactttggaaatttctagtcaatgccaccaatggtccctttgtcgacagccataacaccattttctttgagaatgttgagcaattgaacgcagcagcaatcgaacgcattgtctcattgatcaaaaccaccaatgtgcggaaccataatcagctgatctttacctatgacaacaataaagcagcggatcaaacgactttcaaccgactggcaagccaattgaactgcgcgaaaatctatgcaccagcgattcgggaacgaaaaaatgaattgagtatcatcacgacattgcttttgaataaaatgaacattgcctgcaacaaagaaatcatgggcttcgagccgaaagccctcgaatcattcatagcttttgactggcctggcaatttcgaccagctgcaatactgtatcaaagaattggtggtcaatgcccgcacccattatattaccgaacaccaagtcacagaattgctgaacaaagaacgactggttcaaaattttacccatctcaaggatcattttactgccaaaaatcctttacatcaccccacgttgtttgactacaccaaagaaatcattttgagcgtgttagaacaaaatgaaggcaaccagaccaagacagcgaatcagttaggaatcagcagaaccaccctctggcgctacctgaaagaagagcagttgtagtgagagaccacaaaaacgaaaaatcccttgctagcacttctgaaagaatagtcgaaagtgtaagcagggattttgccctgttcattacttctgattctctaaaaacgcttttcactcataactagccatgatctttttgatacagtctaaataatccttccgcaatatctctggggaaataatttctacgtgttcaccgaagccgagaaaataattggtcataaaccgcaattctgtctgatcgaatttcccttcgatccacgttcccgtttctctttggcaaagagacatattggaaaatggatgcttcaaaaaatattctttccctgtttcactgaccttagccttgaagggaatgtttcggtaggtttgcatttgcttctggtacgaatccagcaactcctcttttgcatacaaggtttgatagggtatttccaccacgatcgatgccataaaatcgcaacggtaggtccgccatgcttcttttgttaaatcgaatgccgtacaataccagtagccatccattagaatcagtcgagtcggcaacagccgtttttgttgcaaaccgtagcgtgtatactccactgtgatgatcgcatttgtcaaaatacattcaaacaactgttccaaattttcagtcgtggcgatttgactgattccttcatactgcacacaatccaacatagtcgcgatttgctgctgtttctcctttgggaaggtatgcaacaatttttcttgtagctggccataagtagcgccaaatggtgaatcggtcaataatttcaatagttgtaaggaataaaaaatggcgaagacctctttttcgctaaagtaaatgggcggcaacaacgtattttgcaagacctgataaccaccatagcgtccattctcgacatatagtggcacccctagtgcttcaagttcttgaatatcacgaagtgctgtgctctttgaaatagcaaaagtctccatcaattcctttaaatgaaagactttcttttcattgatataaaacatttcttgttggattctttctgtttttttcatattctcctccaaaggtgtcatgaaatgaaaccattaactgttacagttagtttatcatagagaaaaggagaattgattatggcatccatcgatgtagcactttttttgaccttagaaggaaaaggaacagaagcactggctttctatcaggatatttttgatggaaaactattatttaaaatgacgtttcaagaatttaaaacccaattggctcccgatactgtgattgaaactggcaccgagcattggctttcccacgcagtactgcaaataggccagacgcaaatgcagttgacagatcaacccattgatcctaggattccttgccagcaaggaaataccttgtcattgagtgtcattacggatacgatcgaaaaagcacaaaccatttacgagaaaatgagccaacaccaattgagcaagatctatcagtctcctattcaaaatgaatttgcggacttctatgccatcttgcaagatccgtttggtttggtcattcaaatcaccaaagaaaaaacactttctgatgagtaggaggaaaatcaatgcgtcagtatcaaacaaaagcagaattgatccaaaccattcaggatacgtttcaaaaatacatcaccgaatttgaggagattccagaagaatggagacaccagcaccatgatgaggtagataaaagtccctctgaaaatttgtcttatcaactagggtggctccatcttctattagactgggaagcccaagaaaaaaacggcgttgctgtgcaaacaccagcagcaggctataagtggaatcagttaggtgcactttatgatcaattttatcagcgctatgggcagctttccctaaaagaacagcaacagcagttgacccaactggtggaggaactatgccaatggatcagcacactatcagataccgaactgtttgagcccggacagagaaagtgggccacaaccaaagcacaatggcccctgtataaatggatccacattaattcagtggcgccattcactaatttccgaacaaaaatcagaaaatggaaacgattggtgatggcctaaaatgcggcaatcagagaaattgatgactgcattattgaagatgcaccatatagctggccccactaagattcaaacggagagacaaaacagcgtgtatgaaggcatgactttcgttgttggaaacacgacttttcgtagccgtctggcgaagaaaacaccaaagaaaaaaggctatttcactgcattgtgggagcaacctcatgaaaagaatcaagcttattcattaagcggctatccagacaaactaatgattactgtccttgatggcaagcaaaaaggccaatttgtcttcccatcttctgttcttgtcgccaacggcatcatcaaaacagaaacaaccgcaggaaaaatggcttttcgcgtgtatccaccatgggtgcaggacttaaatcctaccgcatcccgaacacaaaactggcaaacgccttatttcctcgatttatctgaacctctcaagcagactgaaaccctagaaaagttttactttcactgaaaaaaggcttagaagatgtccgcgcttctgagcttttttctctcatcccgtctctaatttcctttattagcaaaaatcttatttttcctttgacagattccaaactattttgtacactaaataaaacaatttaaatattctgaaaatttaaacaaaggaagtgattgaatgactgttagtagaagaaaggcaattattttattattatagtcgggactgtttgagtattttattcaaagagtccctattcacattgcaccagaagaacagagaatcttcttgggtggaatgtttttttataccctttttaaagctttgcttgttgaaaacttttgctggtagctgtgctggttttctattgattcctctgatccgcagcatctcaggtgttggaaacggtgataggattgctagtccctttacgtcaagatggaaggaaagtcttaatgaatacaataaattcgattgccaaatttgtgaataaatacctgatttatctcatggtccttttgatgctgatctcctacctgtttccccaaccatttttgtggatacctacgcgcacaacaacgttactaagcatcatcatgttttgtatgggaatgacgttaaatgtcactgcttttaaaatggtggtgattcagccaaaagcttttcttttaggtttattgatccaatttaccatcagcccgcttgttgcttatggcttggcacagcttttcggattatcctccggactgatcatcggttttgtcttgctgggttctgtttcaggaggaaccgccagcaacgtgatgaccttcatcggcaagggagatgtcgcattgacggtctctttgaccactatctccacgctaatggcaacggtggtgaccccttttcttgtctattttttagctggacagtatacagaaatctcatttttcgccatgcttttgtcggttttgcagatggtactactgccgattcttttagggatcatcgtccacaagcttattgtcaactatatcgatgcgtggatgcaggcttttgttttagtctcttccgtcagcatccttttgatcgttgcaggaaccgtggcgaaaaatggggcagtgatcgttcagtctggaataatcgtcatcttccttgtcttgttgcataatcttatcggttacggtgcaggctacgggattagccgcctactaggtgtcagtgaccaacaggccaagtcgatcatgtttcaattaggaatgaaaaataccggattagccatctccttagcgaatgcccatttcgccacgatcgctgctgccgttactccagctgctgttggcatgatcattcatcaaatcacaggaccaatattagcgaatatcgtcgcaaagaaagaaggaaaacaatatgagtcaaagtatctttttgccaaattatacgatcggaacagacgcttacgaaaaagtaaatgatatcgttaaaagttatgggacaaaagctgttctgattggtggaaaaacagcactagcgaaagcagagcacaaaatcaagtctgccttgacacaagacgtattcgtcattgacagcctatggtatggtggaaattctacctatgaaaatgtttcacgcttactgcaggaagaaagtgtccaagcagcggagatcttatttgccgtcggtggcgggcgtgtgtgtgataccgtcaaagtcgtgggtgagaaattagccaagcccgtcttcacatttccgacgattggctcaaattgttctcccgttacagccgtatgtgtgatctacaccgaagcaggcgaaatgcatggcttgttctttccttcaaaaccgccggtccatgcctttattgatacagccattatcgccgcagcgccggatagttacctgtgggccggcatcggtgacgccttatcgaaagaaatcgaagccactttttcttccagaggggatcaattggatcataccgatgcattaggcattcagatcagcaaaatgtgcacggagcgcttattgacctacggcacgcaagcgttgaaagacagtgccgccaatcgcccctcggatgccatccaacaagtcgtctcagatatcatcgtgaccaccgggttagtatctgtcttagtcatcaatgactacaattctgccatggcccattcgttctattatggtacgactgttctggaaaaaatggagaattatctgcatggggcttctgtcagctacggcgttctagcattgttgatgatggatcagcaaaccgaactctttcaacgagtctatgcttttatgaaagaaaacaagctgcccgtctgtttggctgacatgcacctcaatgcccaatcggacttggaagccatcttagataaagccatgaccaccaacgacattgttcatgtaccctatcccatcactcgcgagatgttccagcaagccattcttgctgtagaagcctatcatgccaaacaagaaaagcagcagtacactactattggataaataccacgaataaaccaagaatctttctaccaacaaagtaagcaaaaaagagcagctcgagttgattcgcgctgctctttttctattacggcttatcaattaactaaggaattcattttcaactaatcgtggtcttatcggctgaacaatcgttgcgccattctactaccttttggaaatagtcatttgttatgagagagaaacgactgaccaattactttggcggatgatcgccgatagtgatagcatctctcctttctcaatgagtcgttttgtccagtgattggatcacttctctaagttggctgcaggattgggcaaatttttgcttctcggctgggtcgatattcagctcaatgatttcccgcacccctccttggtcaaccaccgaagggacacctgtaaatagatccttttcgccgtattccccatcgagataggcagagacaggcaatactgcttgctcattgttcaagattgctcgaacgattctggcaacactcataccgataccatagaaggtggcttttttacgattgatgatctcataagcgctatttttcacccgatcagaaatggttgtcaaatcttcgacagtcaatcgatggtttttgacgataaactctagcaacggttttccccctactgtcgtatgtgaccagactgctacttcagagtccccatgctcgccaataatgtagccatggatacttcttgggtcaatctctaatttttgcgccaattctttacggaatctggtggtatctagcgttgtcccagttccaacgacgcggttgcttggcagacccgatgcttgccaagcaacgtgtgtcaatacatccacagggttagaagcaatgactaaaatcccatcaaaacctgaccccatcacttctcttacaacactagtcatgatccccgcgttgacatcgattagttccaaccgtgtttgtcctggtttttggttgacacctgccgtgatcaccacgatatctgcatcctggcaatcagtatagtcgccagcccaaactttgatgttttcctgggcccatgacatcccatccaataaatcaagggcttctccttccgccttttcacgatccacatcgatcaaaaccaattcattgatcagcccttggttgatcattgagtaagcaatacttgttcctacaaatccagttccaacgacaactacttttctacttgtatttctcatatgaacccacatccttttctattatttagaaacaatatgactttcatttatcccgcaataacaacaattttcttactcgaacttacaaagacacgtccattaataccttaacattcatgatctgcgatcaaactctttgtctgactatacaaatgaacgaagtatttcagcaatacatagcaaaccattgcgatagctaatactgtttcaattatactcaataactcagttgtaccaaacaaaatgggacgatctataaagaattgcgaagatttgaacatcgccgttgctgaaatgactaatgggaatgtgaaagccgcataacttggataaaagccgacttccagcatttttttcatgtaaaataccacgcagaaataaattgcttgtgacaataccagcatcaaggctacaaataaagccgatccttctttaaagactgacagatagcccgccaaacaaagggaccctggggcagtcaaaatcgtgatcaatggtactgctgaagcttctgtcatcttttggaatatgattcttttcaggatcactggtagtagtgcaaaatatagcaccagtgcaatccataccacgatttcccccagttctttgataaagactgctgatgtatttggaatcaccccaatgccgacaaaagtaataaaccagcttggatacacatattccaacgtaatgtcgacaggtaaaatatgaacgacaacaaaataagtcatgagacccaaatgcaacccgattgatgtcagccatagcaagtcattcatcagtaaattaggaaatactcgctccaacactaccgagatcaccatcaaagacatggtaaaagtaggtgcaacagaagcgatgatcggatttttcaaatccgctaatgtgtgtttaaatgtgaaaaacagcttaagaaggaacaatcccataatcaaaataccaatcaaacaaaagatattgccgattgcttcgaacccttcggcaaacaataaatttcctaacgaaaccgttcctaaaatcaacccacaaataggtatcggaattgcattcaaaaaattttttagtgcttgattcattgatccatcctttctgaacgattaaaaatttctatcgtacttgtgttatcttttgtagtcatctataatataaccacaaattaactatttgtaaaataacgattttatatatccgttataaattatattaatagaaaaaggtgggattcttttgtttgaactattaaaaacattcgttgtcgtttatgaaactaggaattttagtgttgccgccaaacaaatgtttaagacccagccaaccatctccgtccaaattcaaaaattggagaccgagttagggttcaaactctttgaacgcaaaggaaaacaattgattctacccacgaaacaagcagaattcttgtaccctaaagtggtggattcgttaaattcgttagctagtgtctttgcacaagctaaaaatgccaaaaatttcaagacggactgcgtattggcttgctccaatacaactggtgttcacctactcccaacgatcatgggccagctgatcgaacactttccattcattgctttcgaaatcaaaatcatgaattctcaggaagtcattgatgccgtggaagccaacaaagcccatatcggactgatcgaaaaagccatcgtctctcctttgatccaaaaagagttcgtctataaagacgaacttgttctagcaggagatattgattccgatttctggatcctcagagagaatgattccggaatgtactatatcaatgaaacgtatctttactcgaatcatttgaacccgcagatcattaaagccaacaatagcgaaatgattctagcactactggagaataacatcggcaagtcgatcatttccaaacttgccctcacagacacattgaattggcaagaactagccccagaataccgttaccgagacctgtttattatccagaacgtccaaagcccctacccagaaacagccgcagtttatgatgtgatcaaagacttactgattcagctgtcggaagaggcagatgcctaagaaaacaacacaaaaagcagctcacctactgatgagctgctttttattcctatctcaaaattatctgaaaaaatatttttattagggtattagggtgattagcaaggttgtcaattatagatttcagctacaaaacttaacgcttttttgtctcttaagcattggataatccccggtacaccctaccaaacagcaagagataatgaagcgtttcaatgatctgtaaaaatagcaagaagatttcctgaatgattaaccaactacattgccgtcaaattaactaacacttatttgctcattttatcttgttcttactttacctattggaagaacttgcatgtcttttatgactaattggaacagttcttgtgtcgatttttattactggaaaagcacgctttctttatctgctcttgcctaccaacacttgccatcgttcattcgtcttcaaccaagaaaaggtttcttcatcactaaacatgcggaataaattctcgtaaagttcgttaacgaagttgctgtcgatttccttaaatgtcatgtgttcatacaacgttgaatgggtgaaatcgttgattttagcaacactggcgatgattttctccattgtttcaaccgttctctccgcgtctttttctgcgatggctaagtcaagatcactggatacctcgtgatattcccccatttcaaataattttgctaattctgactgtttctttattagcaaatgtgcctttgcattattctcatccttcatcgccaaaagatataattgttggaataccatactcatcctttgataacttgaaaacagcagctcctcatatgcttgataggcttccgctactcgtccggtcttactgtaaagataggcttgtttgatttttctctctgggttctgattggaaaaataatggaggtagctttctgctttctcgtacgcttcttttcgtacgtaaaatccaaacaaagaatcggctgctcgatttctggtatcttcatcccgactttctaacgcccgttcgtaccaacgatgaatgtgcttctggtatgtttctttagcgggaacagcttgttccaatagctgcacatctaaaagcagtgctacttggccaatcaattgttcacaatttgggtaggtatccaaaatttctttggcccagcgaaatacatcttcaaaaggttgatttttaagcttatgatccagttcacgaatgatctgattgatttcggttaccgtgagttctttttcaaatgagaataacgtatcaagactaatatctagtaagcgtgcaattggcgctagcaacaagatatctggatgtgaatgccccttttcccacttatttactgctggcgctgtcacaccaaggcgcttggctaactcttcctgtgttaatccttttttcttccggtactggcgaatcacttcccccatttccatcgctgtggtctccttttcggttgatagtggtaactgctttgatcataacaagaatccgaacacgcaacaattgactaaatgaatcaattttctaaaaaaaaattaaccagtggttataagagcaatcaaagcggacacagaaaacttgtcccttagttgtttttgtagcaatcttgacgcaaaaaagacacccatctctgagtgtcttaccaatgactgattccccatctagtaaacagtctttatgcttcacttatttgacgattttcttgaccatgtcgaataatgttttcacatcttctggtcgcgtatcgccagtttctttgtcaataatcgaactgtaaatatgcggaatcacttttttaacgcctgcatcaatggcgatttgcagaatttcttcgaagttttccagatcaattcctccggttggttctaaataaaaatcatatttggcgcaagcttccgcaactgctttgaattcttctttgtgcgctaaccctttcattgggaagtatttaatggaacttccacccatgtcttgcagcattttaatggcggtctcgatggggacctctgccgccggtgcttgtgaacttaaaggtccagtggcaatattgacgtaccctaccttgcctgttggtgaaaccaatccattgatgactgtatcgttttgtcccaataaagcacgggaagttcctacaccagtgaatacttggttgacatgttgcggttgtaaagtaccagatagacgggaaaccatctgactttggttgggatctccggcgcccaacccaacggacaatgcattatccgttgccgcttgatattttttcatgtcttcgatcgctgcttcatcgctagtatagttttttgataacacacctagtacgacatgtcctgctgctgcttcataacaagccttcgcattttcaactgaatgagccaatacatttaaacatacgcgatctttataataatttggaataactgacaatttaaaagcctcctacatgatttcttttaagcgtttaatgattttttccatttcgttttggttgaccgagcgaatatcaaactcaataattccattatttgcttgatattcacgtgtgtagactgctgggttttgtgcctttagttcttcaatgacttctttcgcagatttcttgccagcaaccgtgacacttgcgcgataaatatctctcccggcgccatcttgaacaattttcgctgataaatcaggaagttgattgatcgccgccacgaaaggtgccaatcgttgtttcatggactcaccggattcactgccattttgcaggtaatcttctactgcttgtgtaaagcctaaaatattgtctttgccgattttcattgcccgaccgatccctttggactgtagacgaatccattgaatgtattcctttttccctatgaccagaccggcactcggaccttcgattgctttggcgccagaatagataacaaggtcggcacccatttcgctgtatttgaacaagtcttcttccgcggctgcgtcaacgatcaatggcaagtgataggctttggcaacttctaccatctccgacaccgttagcatacttttctgcacggtatgatggcttttaatatatagaagtgcggctgtttcttccgtgatcatcctagcgacatgcgccggtgtacacatgtttgcataacccgcttcgacgacttgtccacccccttgagcaaccattacttcaaccggtgtgccgtagtctacattgtgacccttaggtacgacgatctcccgtctcgtgattttttccgtgtagggatgataaacatggtacaggtcgccttgaccaatcaaagccgcgacagattgggcaatccctgctgaagcagaagaaacaatctgcgcatcttccaccttcaataactgagaaaggtaggcgccagttttcacagtcagatcactcatttcaaaaaaatgttcaccgccaaatcgttgtgcggctagcacattttcagatactttcgagacaccgagtatcgtcatttttcccgaggcattgatgacttcctttaaagcaaacttttcatagctaattgtcataaatgacgcctccaataattgtttggactggaacaatttgttctttcgctatccgtgtaaccccattggaatctttcagttctttttcattttcgacaatctcaaagatcgtcaaatcggcatcaaaaccaacagtcaattgacctttcttcgccaagtggaagtttttggcaggaactgaggtgactttctcaataatctcttcccacgagtagcctactactctcattttttccagcgtagtagccagatcaaagactggaccattcgtacgattgcggatataaatatctgtactgatcgagttggctttgagacctgcttttaaggcagtttcagcaacgtggaaattaaagctgtctgttccatgaccgatatcaaagacaacgccttttttatacgcatcccaaacaaagtctttgatttgatccgtggcttggtctaaaatgccgttcggttttccattaaaacaatgggtcaatacgtcgcctttttccattcttgtcaatacttcttctaattcaggaggcgccgaaccaatatgaaccatcaatggcaagtcattgttttctgattggatttttttggctaactctagtggcgtgatgccattctcgccgacaactgttttgctcattcttgccttgatccctacaataaattccggaagctctgctaatgcagctctgactagatcttcttggatttttgttagatcggcaagttcatcttgttccacgatcccccatttagaaatgttcattagtgcgtacacattggttttgaccgatttcgtcagttgataaaaatcgcgaatattttctgcgcccgtagtccctgcatcaataaccgttgttactcccttttggacccctatttgatccggataatcataataaagattcatcttttcataacagtgaacgtggtcatcgatccaaccggcagagagataggaattgccggatagatcaatcacttctcgtgctggctcattgatttcggcagcaactgctttgattacgcctttttccaacgcaacttccactttcctgccgtcgattaatttgccatttttgattaaagtatcaaacatttcattgccttctttctattgaattaccgctgggaagatcgcacctaagatcattgcgcctagaatagcaccaccggcaattggttttttccaagcataaaaagccaacgcgcctaatgtcgccccaataccaatgggaatagaggccgcacaagcacttaaaatgatcaatgggcctaaaaaccggccggaggaatttccggcgcccatcataacatctgcgccaaaagttgaatttgactgattgatggtgaatttccgaatcaacacgataatgccgccaacgatcagacccaagaccaatccggtcaataacgagagggcaaaattatcgataggcgctgttattttcatacttaagagaatggctggaactccaattccgatcccagttaaaatcgaaccgcctaagtccaagatccctaccaaagagccttccaaaatcctagcaaataagaaactcgccccaaaagctgccgcagccccataggaaccgccatccaagccggcttttagcatcgcaacgatcgaaacttcattgaatgcaccgacgccatacacgacatacatatgggtccctgagaatacagccgctgacatgattcctacgatcaatgggaaagaccagtctgcaaaccaaaaactcttttgccgttttgcttctactgcttttacctgttcttctgtctccatgatttccctcctatttcacactaaagatgttgtgcaagttatcaagccaatgaggtacttgaagttggaaactcttgatcatttccatatcaaatctacggaaaaatccgctgaaaacaaagagtaaaacaatcgcaatcatcatactcttcgtgacccgattccaaccactctcatcgacgcctttaccgattaagattcctagaacaacgccaggaaccgcattgcccatgatcagttgcgcaatcccgccaaaaagcgtcccccagaaacctgttcgtttccctgcatctaaagccgctaaccagaagattactggcatcacggtattgatcagaatcgtcgctgccggtaccaacacggaaacagcggttacttgtaacgcctctggaatcgctgcagctgtcgtattcaagaaagcgactactaacgcgccaataacagctccagtgatccccatttttttcggatcatgcattgtctggctgacatctttgtttttggctaagagagccgcagctgcccagttaggcacgatgcggtgggtcacatcttgcgtgaaagctccagcgccaactgaagaagcccaagcattaaagaaaaaacctaatccaaaggaaaaatgggaggcagcatcccccatgcaggcattcatctcccctaatgttctaaaagctcctaatccttgcgtactgggcgcatgaaacatacgagctgctccgacagatgcagagaaaccgagtaagcccccgatgatgatcgatttagttaaaataatgacaaaatccacgttattccctcctccttatgattcaaatcaaacttttttcgttacaaacggtaaaacaatcccattggggtcttctgtgaggtgttgagtgaaaggtacatctgccaaacgtatttctgtcacagttaccgtgacagaaagttcgacttcataattcactcgttgccggggaaaaaagaagaatagaaagcgttctgtgtatttgttttcgaccgccttcaacacctccacattgactggttcgatgcgcaataatactttcgccgatgccattagtttgttttggatctctgcgagtgctgatgcaaaggcatgttgcttagtttctcctttaccggagacgatgactttttgctgagttgtcttttgaacgctcatcttgtgtgccctctttctattttccgtgctttttgataaattcttccgtcaagcgtcttcctagctcttcttgatccatgaagccgaatcctagcacggttttaccatctttgatggctgtgactccttcttcaatcgaacgcatcccatgacgttctggatacccatatttatttgcggctgttaaggctccagccccaccgctcccgcaaaaagaaattcccatatcggcattctcttgttgcatgacatcacctaaacgcatatctgcgcccattcccgggacaacaactgccttgccgccagctgcttctacacctttagctacgttttgtccttttcccatacgatctgcaataactactgtaatcatgactgtttcctcctaaatattaattattttttgctgtttcaaaatgaatcgataaaacatacatctcatcttcacctaaatcaccaatcgttcgaacgacttcatcggaaatcgcaatggcttctttggatacttctcggaacaattcccgatcaacagcgggaatcttttctcctttttgagagcgtttcagcatctcgttcaagtgattgatcaaaatcgtccactgaagttcagtaggttcaatggcatattctgcaagtcgctcttcgaccaaagcaatcacttgttttaatttttcctggttttgactttcctcgatcatagttatcgcttctgctgacagtttcactagcttgacgctccttcttttatatatgaaaataatgcgctgatttctgatttgttgatgcctaaattattttcagcaaaaattgcttcaatttctcctaccaacgcttctcggttcaaaatgatttggtcgacttggctgccttctgctaaatattgctgatcaaatgtgatgcgatggaccattaagaaaacatggagcaaaaaggcttctcggtactcttggatcaattcagactctaatgtgacaagtaactgttcatagatcgtatatgcctttaaaatcagttccttgctgaagtcttccagagtttctttattgataggtgcttcattgagaactaattgatgccgcctatcctgacttgttgaagcgaggatttttttgatcatttgctggatgttttgcagatcctgctcagtcggcagcggatggactttgatgaaaggccgatcaatgccattgatcggaaaaatactaatgaccagatccggatccttcgcggcaatcaccttttgtgcatttaagactgaagcaaaagctacaatagtaatattgttcaattcttcgttgatcttttgcttaattaaacttgtcacacctaaccccgttgaacaaacgtaaaccgctcgaacacttcgcaagtcttcttctctttcgtaggaaaccagaaagtgcaacgcaatgtaggcaacaaaagaatcattgatcaagagtttctcgcttatttcttggagggctgcttgattgatagcagcaaacaattcaggatatttctgtttgatgtcctctttaaacggattgtactcattgacaaaatttttccttcttgagagacgcatagacaaatgggcgtagagattcgtcaataattgagggtcttgataaaacggaaaattgattttcttgcttaccttataaatcatattctctaccaatttcatgacatcttgctgatggatcgtatcaaaggtatcactataaatatagtcatattcatcttcaaataatggcaattgatagtaatcaaacacctgctgcatcacccgatacgaaagatcgtttttttctatttcgtgttcaggaatcaattggtaccgtccaatcgtggcctctttgcgcaagcgaacagtggcgatcgttacgcgaatcagaatatttagtagttctgcataatttagtttttcaagattttcgaattccagtaagtgccgcatccgaatgatgacttgattaaagacctcctgcaacggcgtttccttcgcagaatacatttcgaaacattccgtttctctgccatttagcaacaacgccattaatttatagatgtcatagtccgtaaactctttttgcagaatctcctcgatcgttaaccgaaccaaacgttcattgccagtgatccaaaatccctttcgtgtctggcgattcagaactaaaccttctttgagaaagtgatgttccaactcatctaaatcattcatgatcgtatctttacttacttctagcgcattggctaactttagcgccgtgattgcttccttggtaacaagaagcatgatcaacaggcgattgatccgtaagctttgatcggcaaatagctccagacgattgacatccatcaactcgctttttaatttgattcgatcagaatcactcacactgagccaaattccctgactccgtttgctgtacagttcttgattccgctcaatcagccaatcacggatatcatccagatcatatttgatcgttcgcacactgacattttctttttcagctaactgtttgatcgttactggttcagtcatctctaacaagtaaatcaaaagctggctttctcttttggtaagctgctgcatcgttctcgctccttacaccgctaaatataagcgttttcttaactagtcacaatatgaaatgtttgcacttagattagtgcaattgatcgtaatttaacaactcatcaacttattcacaagcttatcccccctcaaaaccgcaacttggacccattaattattgcactaagtagtccctttacaaaatttcgatgccattttttctgctttttttattttatgacattaatccaactggcagataccctttacctcgatgtatcagaaaacgattccccgcatgacatcattaaacagcaaaaaacactttccaacttttggaaagtgtcaggaaataggatatgaacgtgttcgttttcttgattgattgttatttaatctggtaattgtgcatcaatgaaaccgttagacgtttccatcttgattaactttgaacagctatttattgaatcaggagaagaaacagttcaagatcaatacacttgagaaccaatgaaaacccactattgctatgccatttgtcattaaaactacttccatttgtactcgcctacttcatttcaaactctttgccgaattttattagatacattttttccaaagtgtcctctaacaaatacaacttcctaggggagataaatgcattcttccagtcccaatttaccaaatcatactttccaatgttcgccatcgctcttacttcttcaatcgataagttcaattcttttcttagttcatcgattttttggatttgtttttttcttctgagagccgttggtacattgatcgaagaaatgaccaccataaaccctaaaaaagaggtccattcataataaaagtcaaatacattacatacaaataacagaaacaagcctaacaagaagaaaataatcgaatacaaccaatcgatcttttcattagctaccatctttttcacctttatttgcctccttcctacttaccttcaagacaaacaataaaaaatacagaaagcaactcgcttgatttcagccgctcccagctatattttactatggttctgattgactgttcgttaaatatttttcactattcttctatttttttcaaccttaaccgcaacacaagatacatcatacctccaaaaaagcaacctccgggaatggaagcaacgattctggctggtgaaacgatgtatggaaggaaatcttcttcatccaacatcttactaagtactccattcaataagtgaatcgcaattgcaaagtagatacccagtccaattcctttaagaatcgtcttcttcttttcttttgccatctctttgacttctacttcgttttctgtcaattttaagcgtgccgtggcaaacagaatataaccgcaaacgataaagactgtaaagaatatattacagccaataaaaatccataacgccagctctggtttcttagatgcaaaaagcgttaccagtaaattagcaaccagcgtatacccaaacatcagcataaacgcattatcgccaatatgttctacttggctttttttgtattcatctaagacaccagaaataccataaaaccgcttgattatttttactgccaatccttctttagccttcatcactttctacctcccaaaacaaagaatttaaatccgtttgtagtactttagcaagcttaatacataaatcaagagaaggattatacttattattttcaatcaaattgatcgtttgtcttgccaccccaatctctttagctaaagcattctgagataaattcatcttctgtcgaaattctcggactctattcattcttttctcctatttagtcatatatatgtgacacaagcgtactacttatctctttttctgtcaaatatatatgacatattaccaagctagtgtaaactcccagcaatcgatctcacaagctttgtagagagtataaaatttataatccatatcagcaaatctaggctagaagtacgtaaaaaagacccttccaatggaacagaccatcattacctaagataactattctagtagaatggaataagctttgcatgttccacattctgtaaccagcatctttcgttgatgagacgatacgctaaaaacttctttcttaatcctctcatcatagaactcttcttttttctcgaatcactttttgctatactaattgaacatatcgaaatttttattgtttatggaggaaccatgcaaaaatttattggaaacaaagctttttacaggactgttttaacgatcgccattccgatcatgatccaaaatgccatcactaattttgtcggtttattagacaatttaatggtaggacaaatcggaacggcccaaatgtctggcgtggcgatcgttaaccaactaattttcgtttttaacttaagtatctttggcattgtttctgccggtagtatttttggtacccaattttatgggaaaaaggattatcaagggatgcgagatgcctttcgtttcaagctagcgggcaatcttttgatttgtttgttggcgatggggctgctgttcttttgccaagattttttgattcgcttatatttacacggtaccggtgacagtgcagaactgacacttgctttgacgtctgccaaagaatttctagtcattcttttgtttagtctgccgttttttgctatttctcaagcttatgccagttctttacgcgaaatgggcaaaaccatggtaccgatgtttgccagcagtatcgctgtcgtcacgaacacagcattgaatttcttattgatttttggtttgtttttcttccccactttaggggtgcgaggtgccgcgatctccacattgattgcccgcatcgtcgaatgtgccatcacgatgtattgggtacatcgccatgaggaagagaatccgtttgccattcgggtctaccatcaattccatgtcccattgcatttggtgaaacagattctgcgtaaaggatcaccattgatggcaaatgaaatcctttgggcgatcgggcagacaatgattattcaagcttattctgttcgaggactatcagtgattgcttccttgaacatctcatccaccgtctccaatttgttcaatattgtctatatggcactcggcggtgccgttgcggtcatggtagggcaacttcttggagccgctaaatttgaagaagccaaagacagcgcccggaaactgcttttcttttccgtcatgagttgtcttgtacttggtcttttgatgatcctagtcgcaccattctttccagaaatttatcaaaccgaactcgaagtcaaacatctggcgagtcaattcatcaaagtcgccgcactgtgtatgcctatgtacgcctttaatcatgccagctattttattttacgttcaggtgggcaaaccttgatcaccttcttatttgacagtgtctttacctgggtgatcgtcttgcctctagcctttgtattaagtacccacaccagtctttcgattgtcttagtctacttgttctgccaactagcagaactattgaagagcgggattgggtatcgtttgattcgatccgatctttgggtgaagaatattgtgcattgaggaaaagtttcaacataggggatgaaaaagatggatagtctggtggaaatgagtgattttttatcctaaaaataaataagacattcctaaaaccgattatgattttgggaacgtcttatttattaagattatatttattcttttgaccattgaaaatatagacatttcatacaaaaactgttttcaaaaaatggtagctttactaaaaatgactccgcaaaatgatcatagtaattttttgctattattgaaataatttttttccagtccaacttgaaatttcgtaactttgtaaagtttttggaatcgtactgtaattcaaataagtagcattttcgtaccaaccatctgccactacaataaagtttgcttgtgccccattcatagtgcccgataatgccccttgggtaaataccgtatgtcctccaatacttccgttaggtttatagtaaaaataagtaaatgctactggataactctgtgcaattttcgtttggatatccgaaaacgaaggagacacttttctctgatatgttaaactaacacttttatcttttgcgtattttactagtgctggtccaatttggtcaggttgtgtccctccataagagattccattattggttgaagatacggtagttcctgaatagttccacaatgaattgtatgccacctttaattccgaatcatttccagaattaaagaatctataggaagaacttatagttgctaatgcatgtactgcacaagcgtatttcccagtggctttttcagatctactctgggatagcgcattaaacattgctaaataatgtgcacttgtcaagtgtaaattacttggataattactaaataccgcgcttgcatggtcatactttgtagaacgagaattatatctagaaaagtgttctatttccatttcagcaacaggctgtacttcttctacatacttttcaaattcatttagtgaaaagttctcaccgttggtactgatgactgaatctttgtcttctacaactaaattatattcagtgggaaaagtctcaattaaataagattcctcagtattatcaactttcatttgtgatttatctgctaaaaatcatataaactttttgatccaagttctatagaaaattgagcaatataagtaccttccattcttaaatcaattataacgtaaccgtgtgtcacaccctctttaataaaatctacactataagaaataattttttcttctgtatcataaatgggaattatagaagaaacaaccaaatcttcagttcctttaaattcttttgcaaagtttaaagctaaattggctaagctttcatcagttatttcaacagcagactgttcagaataattttcactgatgtctgcttctgaaatggaaacttcttttgcattagtactcttctctgtatatagaaacacaaaacaacttgttaccattacccataaaattctactgattttcttcatttttaactactctctttgtttgccaaccagcgcaaccatagaacacaatgtattattcattccacttaaaaccatattctatgaccaacattttttcacttcatttacctagcatttacaaattttatgacagtttaaaacattcagtagagcttaattgcttcgagagtgtaaaatattttgtgtaaatagaaaaaaggaagtcccttctgtagaatagagttaccacaacacattcacagaaaagaggacttccctatgaacgattttactacagaaattctaaagactctagcgaacaaaggcgatttgaatgaattattccgtgtccatttggagaaagcagtcaatacgcttctcaaaacggagttaacggctttcctagattacgaaaagtatgatcgcattggttttaacacgggtaattctcgtaacggctcctatgaccgtacggtcaagaccgagtatggggaacttcatctccagattccgcgcgaccgcaatggtgagttcaagcaacagactgttcctgcttatagacggacgaatgacacgttagaggagaccgtcattcacctcttccgaaaaggtattaccatgtcggaaatcgcagacttgattgagaaaatgtatgggcattactacacgccccaaaccatgtccaatataacaaaatcatttacagaagaggtaacggcgtttaaagggcgggagcttcatgaccgttatgctgctatttatatggacgcaacgtatattccgttaaagcggaaaaccgtcgccaaggaagctattcatatcgcagttggcattcgcccggacggatcaaaggaagtattgagctatgcgattgcaccgactgaatccatcacgatttgggaggaaattttattggaccttcaagagcgcggtttgaaaaatgtcctcctgttcatcacggatggcttaaaggggatggtaggagcgattagtcggttctatcccaaagctcgttttcaacattgttgtgtacacgtttcccgtaatatcagtcacaaagtgcgtgtcgatgatcgtaaggaagtctgtgatgattttaaaatggtgtatcaagcctcatctaaagaggtggcgttggaagcacgtggtgcttttgcggaaaaatggaaaaccagctatccaaaagtggttgaatcgattctttcgaacgatcacttgctcactttctatgatttccccttggccatacgcaagagtatttattctacgaacttgattgaatcctttaataagcaaatcaagaaatacagccaccgcaaggaacagttccaaaacgaagagtcgatggaacgtttcttagtctcgtcttttgatacttacaaccaaaaattcctaggtcgcagtcataaaggctttcaacaggccgaaggcgaacttgaacaaatgctaagccaactgattgagaattagaaacaatctgcagtagggaagaatcatttacacaaaattattgacgctcccggtaccggtggtgggaagacatatttcattcttacaattattgaagccctactacgaacaaaagctaaattatttattttagaccccaaaaatgcagatttagctgatttaggtacagttatggaaaatgtctattacaagaaagaagatatttctgaatgtatagatgatttctacaatcgaatgattaatagaagtttagagatgaaaaaaatgtccaattataaaacaggagaaaattatgcttatttaaaacttactcgatttcacttttaatacgaccacctcccataaataatatttaaatttatggaaaggaagatggtctatgaatacactgaaagaagattttattttagcaaaagctggaaatgaagaagccattgaagccattcttaaaagattcagctcgttgatgcacaaaaaatcgtggagaaacggaaaatacgatcaagattgttatcaagaatgtatgattgcagtctatctagcaatttcaaaatttgaaatcaaggaataagctcattttggggagatgcattttgcttctccctttcttcttatctacctcaccttatccattaaatttttcaattcagttacatttgttaactcgattatattaggaattggctgctttattagattattcctagtgagttttgttaaatatctactaagtgtttctggagtcatccctaaataagaagcaagttcttttttcgtagtttccaattttatctgctctgtattttgctttatattttcttctaacaaatactgaattaagcgtgtttctgctctttcagtcgtgattcctacagttaatcgttctgtattatcaagacgtctcgccatttctgataaaagttctagagctatttggggatgcgatagtaaaatccgcttaaagttgtccttttgaatggtacatactttagttggtgatattgcttctataaagcatccataatgttgttcttcaaataatgccagctcgcccacaaaatcaccctgttctaaaatacgaatcacctgttctttacctgaagaacctaagcgataaacttttacttttccttcttgaataagataaagagattcaagtatatcttctgcttgatagataaactgtcctgcagaaaaagcttgttctgtaatatcactttggataaattgaatttcagtgagggacaatccctgaaataaaggcattgtacttatacaatgatcatattttgtgaaatcaatcatgttcttactactcctctttttgtggttagtatagcataaaaaaacgttcactcatgtaatatcatcagtgaacgattttctatacttatttttctttatctgcatcataaagaacagcgcgtactgaaacttcaatggaatcctttactgctttagaatatggacaaactttatgcgcttcttcagcaattttttgaacttcttctaaatctaaatcttgaattgcaacttgaatctcaacacttaatttaaagtccacatcgtctggctttttgtataattttactgtatgtgtaacttgtgaagattgatgaattttacgttgacccttaacaatttctaatgccccgtgaaaacaagcactgtatcctaaagcaaataattgttctgggtttactccactcccagatcctcccatttctttaggtgtagaaatcttcacttcaaatgatccatcatttaaatagctcactccatcacggccaccggtattagtcgctgttgtttcgtaaatttttttgtaatctgacatattgaagtcactccttttcacttttatggtcctattttaggaaataaagttggtgttggcattgatctaaatcaagaatcataaagttaagaataactttatgaaaaaatatcgttggatgcagtatatctctttacttgaactttattagctatgtttattggtctttttgttaaggtaaataaatattaacaaagctattattgcgcctccaaaagaaccacctatcgcaataaacacatccactgttccttgaattcgaatgatatttgatttagttataaaatggatgaactatgatataattttttgctttaggtttccttcagattccatcagctacaaagttgctacccgtgcagggtacatcaaaaaaggaaatgccaaagcatttcctaaagtgtgatttggtcaaaacaacaccatttgacaaagcactgaagaaactagaatgacttttcatcaataaaccctattgttcgttcagattttccatttactccaacacaaaggagtttttgaaaacaaattcactcctccctcctaaatcttcttaaaaaccattattctccgccaatgtcttaaaccattccccagatttcttaatcgtcttaatctgagtgtgaatatcattagcgattaagccgtagcggttacggtaggcattgctccaggaccagcaatcgataggagtccatagatggtagccaaagcagttggaaccttcttcaatccctttatgcaaccattggagatgctctttgataaattctatgcggtaatcgtctagaatttgccctttttcatccataaagcgttcttcccgagaaacccccatgccattttcagaaacaaaccaaggtagattgccataattatcgcgaatattgatggcaatgtcatacactgctttgggatagatttcccaacctttgtcaatattcatgcgacggccaggcatttgatatgcatcataataacgatcaggcatccaggcacccactgaatttggagcaatgtcaggtgtcttgacccggtttggatgatagaaattcactccgataaaatcaacagtattttccttaatcaaagctaactcatcagcagttgactgccacaataccccatccttagtcagcaattctagcaattccacaggaaattcccctttgatggctgggtcgagaaacattttattgttccacagttcggcaattcgggctgcctcttgatctgcttcagcatctgaagctgcgtaagttggcgtcaagtttaacacggtaccaatccggccaccagcttgtggttgacccatttcgcgaaacttcgccatgaccttagcggaagcgagatttaaattgtatgccacttgtactgctttcttgccatccaccaattttggataatgaaattggaacaagtactccccatctactaccaccatcggctcattgtgggtcacccagtctttcacacggtcaccaaacaaagcaaaacattgttcagcaaatcccacaaacaaatcgacaactttcttcgattcccaaccgccatatttatggtaaagctccactggcaaatcaaaatgatggaggttaaaaatcggtcggatattttgagagaggaactcatcaatcacattattgtaaaaagcaacacccactggatccacttcattggtttccaaatccttgatgagacgggtccattgaatcgaggtgcgaagggaattcaatcccgtttgcttcatcaatgcgatatcttctcggtagctattgtaaaagttcgaagccatatctggccccactcggtcataaaaaacttcaggttcaatatcgtaccaatgatcaaacatattggcatgtttcttttgaaaacggccttctgattggggaccagatgtggctgcaccccaccagaaatcttttggaaatgtcaacatagcattctactccttttctctcaaaacgtcggctaaacactgccgcatatgatcgccaaattttggcaagtattcatggccatactctggataaaatagcatttctttgtcagctgcgctacttagctgattgtacacagcaaactgggttttcggtggacagactgtatctgcaaggccaattgcccaatgcaccttccctttgatccaaggagcaaagtattgcaaatcaatgtaatccaatgtttcaaagaaagcttcttctcgttggtgcaaggggtctttaaagcgaaaccaataagccaactcttcataggcggagttttctacatctaagcgataagcttcgcgataatcacttaggaacggataacaaacaaaagattccttgatttccggagcaacagccgcacaaatcaacgccaaagctcctccttgtgacgcaccataggtatacagttggctggtatccacttggggttctgctaccattagccgagtcaactggtaaatatcgagaaacacacttcgataaaataaatcatttggtccagactccactccccggattatatgccctttcagactggttttcgtggtcaatcccacatcttctgacaaaccaccttgtcctctaacatcgagtgccactacccaaaagccttcagcagccatagcgaccttgtctgaccaatccccagcatctgagtgatacccatgaaattgaagcaagaggggagactttttttgcagacgtttaggccgaatgagttgacaatggacggtggctccttgaacacctgtaaaagttaaatcaaatgcttctgctactgaagaattcaagggatgaggctctaaatgatagtctgtccccaaatcatctacctcttgaaaccctgcctgccaaaaagcttcaaaatcagcaggctttcgctgactcccttgatagttttgccaccttttttttgcatctattgcatacattaaacttgctcctttcgtaagtgatagtttgccactgctcctatcagattagcatcttgttgaaactgacaaatcttcacagtaattcgttggtcctctgaatgatgatgttgttgtaacaaacataattgggcttttaccggagccaatagatctttgcgcattgatatgccaccaccgatacagactacttcaggatcgatgaccaagcaaacattataaataccaatcgccaaggctcggaacaattgttgaacttcttgttgagccaattgatctccagtgtcagcaatatcaaatagttctcgacctgtaatacctgataccaaacctttctgttcgcaatagcgctttgcagcatgaacagggctggctaactcacttaacgtttgtccattttccgccaacatgtagccaaattcgcctccaaataagttatgccccttgactagtttccgctccaacaccacggctccaccgattcccgatccaatgatgaaagaaactgaacttttggcatctttggcagcaccataaaaggcttctgctaaccctgcacaattggcatcattttccacgaagacaggtttttccaataactcctctaattctgcaacaaaatgaattttatgaatataggggatcgcactgtagcccccgataatcccctgatcactgtccactgctccgggtacactgatcgacaccgcttcaatcggtgtctgactacaactggttaaattatgcaaagtggcttttaggtccatcttcatttgctcccaagtcacgggtgtcacaaaggaacctttttcggtcaaggcttctgctgcccacagagcatatttgatactcgtacccccaatatcaattgctaaaatactcaagaattccccctactttctcagtctacttacctacactaattttcattgtaagtagttatttatttttaggtatatacttttaaaatttgaaaatcaaaataaaaagcggaaagaggatttttccgcttacttattctctcgttaagacaaactccaccgaaaaactatcataacgatgaactgaaatggagtactcaaaagcgatgcctgtatcaaaataagcaatttgctctgccactgccaccggatctcccgaatccaattctagatactgttgttcgatttcagtcgcctttcggacactgacgcgtcgatgcccactttggattttcaaaccgagatcttcttcaatatattcataaatggacccttcaatattggcttttttcaaaccaggaatcaaatcgataggcatgtacattttttccataaccaacggcttgccatcaatgtgacgcacccgataaatatcatacacgaaagtatcttcctgcatatttaatttattttttaccaagttatccgcttctattaccttaaactccaaaactttacttttaacttcttttcctggattgagagcagtcgtcccacgaaactgattagccaccgcaattcgttctatttcatcggtcgccaaatccttgacaaaagtaccggatccacgacgtttgataatcaatccctctgacactaacatatctaaggcctttttcaccgtcatcttactagcgtcatattccacacaaagatctttttcgaagggaatttgttgatttgcttgatatacaccttccagtatcttcttacggatatcactggaaataaggatatattttttcatcgtcatgttacctccacttatggcttatcctaatatcttatcctatctgctaccgaatggaaatagccagccactgtccttttgaaattatttatctactcgtcgtaaatgatacagttgagacgcataatcccccggcaattgacgggaccaatagtcttttgctcgaccgacatagttgccacccataatcaagccaatgctagaaagatccttaccggaacgtaattgtggcagttgattgatttgataattagcttccaaatctaaaccggccaataataaacgacgataagccggattcggtttacccaacacttgataatccgccaccaaagcttcactcaaatcttttgaaactaccatccaactacactgggtattatcaaaaggactattgagacgataaaaacgcccctcgtggatcaattctcggtattctttaaaggtggcaatcgctgcttttacctgttgtagctctacatctgacatcctcgtaatatccaactccaaaccataagtaccaaacatcgctacctgattacgaaaagtcagtcctggcgaacgccctacttgatgattgggaatctgtgacaaatgactaccgatactagctaatgggtaaaccatcgaagccccgtattgaattttcaagcgttcgaccccatcagtatcatcactggcccaagtctggggtgcatagtagagtaacccaggatcaaaacggccaccgccaccagcgcaggattcaatcaacaaatcggggtattttgctaagattttttcatacaggtcataaacacctaaaatgtagcgatggaacaactctccttgattaccatcggcgaggtaattggaaaatggttctgaaatataacgattcatatcccatttcaggtatgtaattttgccacaagcaagaacgcaatcgatttgctggaaaattgtctccaccacttctgggttgctaaaatccaagacaaactgattccgtccatgagagatttgcttctcagaattaccaattacccactcagggtgcatctcatacaagggtgtatccgtagaaatcatttcgggttcaaaccacagcccaaattccaaacctaattgattgattttcgtcgcaaaggcagagatcccctctggtattttggctagctgcacctgccaattacctaaagagccgttatcactattccgagtaccaaaccagccgtcatccaacacaaacagatccacaccgattgctgctgctttttcagcgatttgtaataatttctcactgtcaaaatcaaaataagtggcttcccaattgttgattaaaacaggtcgttgcttatgagaccagcgaggtgatatcaagtgctcttggaaaaaatgatggaagctttgactcataccattaaaaccggcctcactatacaccagtactgcttccggtgtcaaaaatgtgctttttggagttaattgccaagcaaattcaaaaggattgatacccatttgaattcgcaaaatgtcataagtatccagctgcaaacgtgccacaaaattgccactataaattaagctaaagccatagatctttccttgttcttccgtcgcattggactcacaaacagccataaaaggattgtggacatgactgctggctccacgagtactggcgacttcttgcacaccataagcaatggaatttctactaatctgggtttctctcgcccaagctccatccaagtgtagccaatcatagtgctgatttggaagatccagattaaaactcagacagtccaataactcaaaggtcgtctcactaggattgatgatcttcatttgtctggtcactacagattcttcaccaaacaaggtatagtaaagctcgacttgcaaaggtgaataacgatcttgcaaggtgataattaaagtctcccccgcttcaccaaaactgccaggcaagccagaaagtgcctgttttcctaattcaatccgatagtgttgataggtaaagtgactaatacgatctccttttggatagcgtacccgtagcatgggatagcgaaaatcagtggtaccatagaggcccacttcttgtttgatatgttccaacgaagtagtgtagttttgcttgatttggttgttagcgggacgtatttctctttcaatcaaaaaatcatattgatcataaataggaatactacttccaaaatagagttgttccaagacgtctaactcttccattacccgaaaaatataactaatgttctgattttttaggtgaaactctcttctttcaggattgacactaatcatgatttattccttccatttcacgaaatttttgcgagccttttttcagtaaataggccactccgccaggagccaccaagaaaaacagcaagggactgaccagcaataataggatccaaaaggcataggtccccaagatgaagccatttagcaaactgggtcgtaatgtctgaagtaatagctgatacccaatagcaacaggagcttccttcatttcgtcatacgtcgctgttcccaagacccagtgtgcattatagagtaagaaaagaagcaaagataatcccccagtaactttaaaaaacaagcctagtgaagtgctaccgagccacgcaccagataaaaagatcgccaaggacaaaaatacgcccacagatagcactttttcgcacagtttcgtaggtggtagcttcttggttagtcgacagagcttttcttgtaaggcttctggatggtcgacacaaaaaactaactttttatggctactaacccagccataaataaagccaccagtgactaaccagccccaaaaatgcaaggaacactttactaggacatagagtaattccactgcaactactaatttactggacttctcggtcaccagtaaccctccttttccggtaagcttatttcacagaaccagcaacaccattgtaaatgtatttttgcaaagccaagaagacaaccaaaatcggtaaaataacaataattaccccggctaagatcactggccagttggttccataagggcctttgaatgcaaagagtgccgtggagatcacttttagtttacgatcgggcatatacaagaatggattatagaaatcattgtaaacacccacaccgctgatgattagcatagtgacaataggtgcctttaagttcggtaaaataatccgccaaaagataccaaaatagttggccccgtccaaataggccgattcgtctagagagactgggatttcatctaagtattgcaaaaaaacatagatggaaatcacatctgttcccaaatttagtaaaataactgaccaaatcgtgttgaacaagccaattccttcaatgatttggaacgtcgctacttgactagtaatgccaggaatcaacattgccatcataaacaaagccataatcggctttttcagtttaaaatcaaaacggctcataacataggcaaacatcgagcctaacaaaagcttacctaccatactaattgaaaaaataagcaacgtatttttaaaacctgtcaacatctgaccattgataaacgcagttttgtaattactaaagtccaatgactttggtagcgacaagacactggtagacaaaaattcattattggatttgaaagagccaataaaaactaccaggattggtagtacggcaaccactgccccgataatcaaaatcaaatattgaagtatacgtccgatagaaaattgtcttttcatcttctatgcctccttctcgctaataaatttccgttgaatcaacgtcaccactaagacaatcacgagtaaaataactgccatcgctgaagctaaaccaactttattatacttaaaggcagtatcgatggtttggattacaaaggtcatggtgccgttggatcctccagtcataatatatggaatatcaaagacactcaaggagccgcttatgcccaaaatcagatttaggaagatgattttgcgaatacttggtacgatgatataacgaaactcatcccaacgattagccccatctatttcggctgcttcataaacttctggattgaccgactggattgctcctaaaaaaatcaaaaagttaaagccggtataacgccacaaggaagtaaaggccaaagaaatattattgatggagcgatctcctaaccatagccgaatttgactctccaaacctagcgccgatagcactgtatccaaagttccatcacctttaaagaagtacaagaaaataaatccaattgctaccccatttagtaaataagggaaaaacaaaatccccttccaaaaattagcaaatttgaccttaaaggacaaaatcgttgcaaacaataaagcgacacccaattgcaaaaaagttgcaaagaagtaatacaagctggttttaaaaacggtaaagtattttggattggttaagactgtcttgtagttatctagtccgacaaatttactgtctggggaataaccattccactctgtcaaactgtactggaacatcttcactaaaggataataagataacattaataataaaaataccggaataatggtaaaagtaaagatcaagattcttttttcagttttttggctaaaacgggattttttcaccgtcttattcatggtaaactctccctgtttattcatgttggctcctccttattctaaaacccctcatatcgaccacggtccgcaatcgctatgtactcctgcaaaagaagttactaccaagataagttttctttacgacactgtgcttttgcctggcacaagttgccagacaaaagttagtgcctacaatcaaaactttatttgctatcaatcaaaagtcttttcctaactgctagggtgacttctaaaaaaattttactctcccacttctgctatcgcatctgaccagcgtgtattgaagtctttcataatagcttcgaagctttcgttagagttaccaactgctgcatcgatgattcgttgcttttcagcatctgtcgtacccaaacctagttcagattggtcattgattgaactaaacaatgattcttttccggctggtgctggattttcttcaattaactcaaccccagcatcttgtgcagccttcaatgattctggataatctgctccaatttttgctgacaagcccccgttttcttccgcgtagtctgattcattgactaaccagtcgatcaacttgcgcgccgcttctttgtgcttactatgaacgttgatcccatagttataatctgctccaattggcaaatattgtttaccatcctcggcagtcattggaaatggttggaagataatgtcctcagcagtatcagcattgatgtctttgatttgtggtaccgcccaacttcccaaaaccatgatcccaatcttaccattagccatatctacttttgattgttcccaatcagatgtagttgggtcagcctcaatcaacccttgattgctaacatcgtatagggttttataaatcgtattcatcactttacccgctgcaaatggctctttgtctgaagtcatcttattggtaaagtctttatcaccagaagcaccactgcgaacaaagtcccagtttgataatgtccaaccagccgcatagttagtatatagcggcatcacatcagtatttttttctttgattgtttttaatgctgctacaaaatcttctggtgtttgtggaaattcgtcaataccagcatctttgaagaccttttgattgaccaccatcccagtggcgttcatctgtgacggtaagccataactcgtgccatcataggaccgatcatttaaacccatatactctttgctgagctcttcctttttaccaagtggttcaaaaaagttcccataatcttctggcttgatatctcctggaatcatcaaaacatccccatattcttcactattcatccgggttttaatttggccagcatagtctgtaatcgtttgaatttctactttgatatccgggtacttctcattgaattttgtcatgtattcatcccattttccattggtttcccagtcggttttgtggttgatgaaggtaatggtctcagttttcccaccatccttgtcattagctgaatctttgttatttccacatgcccctagaactaaacctgctactcccaagacgatcattgaacctagcatttttttcttcatgttacttcctcctataaattaataaagtgctgttaccaaaaactgttcatggcctgttacgtcagaaatggaaaacgattacataaatataatactacattcccatttcaaagtatatacttttatatatattgttttgtacttttgtaaaattctcgaatgatcgccgcagccggtttaccgtaaaccccgtaatcgtcgtctttgagcgccatctctcgcgaatataaccgcgccttccagtcccaaataccaaagccttgaatccagtttctcttgtcacaagcagtaaacatcttttcaaaccatcgtgattgcgctatcatgctaacttcccctgaaaaactccaatcattgggtagatattgacttccttcacgacttggacaacccacttcacaaaagaagaaaggtttttggtagtgatttaccacttgttcaatccgatccaattcttgttcccatttgtcaatcggataatagcctgatgaagagatgacatctacagcatcccaccaagttagattattttcttgatacttgtcacaattataagttagtagaccattgtaatgctgtcgaatctgggaaatagtttcccgccactgagcttcccgtcgatcactattaaccaattcacagccgattaccaacatgacacaccctgtctcttcagcgagttttgcatagtgattcaggtattcacgataggaatcaaaccattggctccaagtcggctcgcagggaacatcgtaatcaaaaaaattgatgtgcgctcgccacgtaccatctgccacattgaccatgggtttcaagattactttcaacccgattccctgagcgtaagcgatcatccctttcacttctgcatctattaaaacgttgtcactttgccaatcgattttggtagactgaggatgagcttgtgtgacagtaattggtaatatcacatgacttgcagctaactcttctttcatcatgcgtaatgattctcgactcattggatcttgccagtctccccgttggctcataaacccaaaagttatcccattgatagtttccatcttttcacttctccacgttttattttgtaatcgatttcaattctatattataaaggacgaagaagaaaaaaacaacaaaaatatatacttttgattataatgatttatacaatatgatatagtaaatataataaaattggaggtcttttttggataagaaaaaattgtacacgcagctcactcaaaaaatcatccccttctggcaaggtaagatggatctaattcatgatggtttttacggtcgccgggataagatcccactactaataagagctgcttgatgaacgcccggtatttatggagttttagtcattgctgccgcattttacaagacaaatccttaactgagtcttttttagctagcctaaagactgctgcgaatcctgcctatgaatttttccggtaagtctgttgggaccaggaaaacccaggggatcttctgggagctaaccgcaactgaaatactctctgatcccaataaaaccacttatgctaatagttttgccctctatgttcttagcgagtattacttagactttcatgatctgtctgcattaaaaatggcaaccacgctctttagttttctcgaaaagaagtcttatgaccctcttacaaatggttatcaggaggatttttcccacaactggtagcccgttccctcccaatcaatcggacccagcgatttgccagatctagactttaccactaatacccatttgcactttttagaggcatacataaatttctacatgacgacgccaacattcgatgtaaaaactaccttgcaaagattactcattgtctttacagataagattgcgaccccagcaaactgcctccaatttttcaatgctgattggtgtcctctaagccaagaaatcagttttagccatgacattgaaaccatttgggtattgcaacggactttgactgttactggtatcaaagatgtgcaagtcagtcaatttattgaaaatcttggtactcaagtagctaccaaaggcttcgataacaacaaaatcatttgtgatcattcaaatacccttcaaacctcgactcgaaaaacttggtggacgctagcagaagcaatcatcggcttttacaacctgtatcaattaactaatagtaaggtctattatgaattggctactcaccacttcgaaatggtagaatgaaactttgtggatactcgatctaacagtgaatggtatgcctacctcatcaatgatggacaccagattctacagaagatatcgccaacgcttggaaaggccccttaccatacctgtcgtatgtacacagaaacaattgcacgcctatctaggtaagaaaaacaggacgacctgacttctagagaatcattcgaattgtagtgacatcgcaaaaagccaactaaagaacagttggctttttgatagtttattttagtaatttctgcttagatgcaaatatatgcgcaaatggttctttagctcttggttatccttaatactacaacctaattgattctctccagcaactccaccctatttttcataatttttgaattaaaataaaggtaatcccttttaattttctatctttatttcaatatcagaatttattattttaaatttttacatacctgtttatgaaaaactaaataatctgtcaaaaaaatatgattgttcatttctaaatatgttttccaattttaaaatcttttttagcatttttgtttccttttcatatggtttttcgttgttaatagtgactaggatgatattcctattttgaccattgacaattaaatataatttttgaataacgttccctgctattcgagctaagaattcaagtacgccatgacctatttagcgataactacttagagatttctttttgttttgggaagacaaaatgccatgacaatagcagtagataatgatacttccgtaaggctcgccgtaaactggggagaggtgaaattcctatgtgcttacccaaggcaattcaaaaattttagttcatttataaggggatgattttattaaatcaatagtctatctaaacaaaaaacaaacctgtgagtttttaggaattgataacaatactttagataaatggattcgtatatataattttcccgtaataaaaatagacggtataattcgctttgatgtagaagatatcaaaggctttatggatacgttcaaaaagatttgaattttacttttgactgcatatactaaaagtagcgaaatatactgccttacttttttattaaggagtgaggaagttgcctacgaagctttcaaatggaaaatataaaactaatttgagatatccaaaaaaatttaaagaaattacaggtatcagttcagaaaaattccaaaaaacatttccaactaggcaattggctattaaagccgaaaatgaaatgaaaaagaaaatcgcaaaagtcttaagagaggagaatgcaaattcattagagctcaaaggtcaaataaaattcaaggagttttataaatctaaatggcttcctagatatgagttagggcaaactactagatcccataaagctccaagcgatataaccatcattaatacaaagaatttatttcgattgcatattctgcctatatttggtgagtatgccatgagctatcttaatgcaaataccgaaataatatcagatgaactcacaaaaaagtcgaaggaatatgcaaacataaaaatcattaaatgctatgttcgttccatgtttgatattgcagaggttctaaattatattgaatttaatcgtacaacaaaaataattcaaagtattactgcacctaagaaagttgctctggaagaaaaaagaatacgagaaggaaaacaagctttatcttcgaaagaactcactgattggttagacactgtaagagatgatttcaatgatcaattactttcctttcacgattacactctttttatgcttactttatatcttggggatagaaagagtgagacctatgctttgcaatggaaatacattgattttgaaaaccaaacagtccgtcttaaatatgccttggataaacacacaaaaaagaaatttacaaaaggtcgaaaagatactattatccaagttccggaaattgtaatgacactattgcaagaatggaaatcagtgcaagctgaacaactattgaagttgaaaattaaacagacacctgaccaatatctttttagttactccaaaccttctggtgaagtaaattgtccagtccatactgattacttaaattatcgaattaattctataaaaaaaagacatccccatttggttcatttaactcctcataaacttcgacatacttacgcaactttagctagacaaggtggggctgatatgaatcaaatttctaacgctttgacacattcaggtatttcaactacaaaaatttatgtgaatacacctgatttagttgataaagctgtgttcgaagcgcttcagcgaggattacaaaaatctaattaatgtgttctagaatgtgttctaaatataaaaaaagacactttccaaataattggaaagcgtcttgaacgttgatatataaaggatattaacgttttgaaaaatatcaagatgaattttatatatactcaatcaagtttaatccatctgtatcaatacttcacagatttataaatggataaatattgctgggaattgactgaaattgatagtaattgaaccattttgaaccattttagatgttagttgaatacaatttttttaacagcgatctcctatcaatgaactaataatatataaggtttttgactatcttaacattttattgttaagaagatttcttgaaattctcagcttgttccaagacttgttcaaatatgtcattattccattgtggcgggtaaccatttttatgcaaaagtatgactaagtctcgacgaagttggttcttgatatcatcacgaatcgaccaatctgcaaatttcgccttatcgtcaaccaattctttgatgtcttttgctaatttcaaagcattttcatcagaatactcgaattcatggtcatcacgcacttttatgaggatgtcataaaatgctttttcttcataggaaatccctagttcctcgaaggagtctgcatctgctttcaaatctttcatgatatctaataattgttctgataagtcgtccacaaagtctgaaactacttcagatacaaatacctgtgcatcacgattgttataagcttcaacaacctttttcaaccgttcagaaaactcaatagctttgagtttattagacatcctatatgtcttaatttgttgctttaatagtttcaataaagcattaaatttggtatttggcatgttaattttagccaactcatcttgaacttcctggctaaataactcatcggtttcattatttataatatcttcaacaccagttgaggttatcgcatcgtaaaccatctgttgaactaccttattcatcatttcagcatctggagcatcacctttagtttgcttataaataatagagcggattgcaagatagaattgtgctcgttcagtttcttcgtcagttagctcacctgatggaaaaacaatttcatatgcttttttcattttacgcgactcgtgcataaaccgattttctaattcttgagttatttgaacaaattcagcacctgcatttaaagtcatcaaccgttgtgcaggtgaaccggtataaaatatgttagcatcgaattttaccaacatagcatcaatgatggcaagctgatttcggaaaataccaagtgtgattggtaaatcatcaattggatttccttggtcgccaccgtattgttttaatgcttccaacatagcttttcggataccgatataatcaactactaatcctttatccttgccttcaaacactcgattaacacgagaaatcgtttgaattaaagtatgctttttcaaaggtttatcgttatacataactgccaaactcggaacgtcgaatcccgtaatccacatatcgacaactatcgctatttggaaattggagttgttatttttaaattgtttctccaacaattgccgatgtgctttatcaccaatcaaatcaaacatttccttagggtcatcttttccacgagttgccacaagatttacttttggcaattcgactaatttttcaagttcgatttcggataaaactgtcctatcagttttctttgggacaaaccagtctggtcggattttctgtaattcttgataaagtaaataagcatgttcacggctacttgtaacaatcatagccttttgaacaatctcaggtttttcgctaactagacgcatgtaatgtacagcaatatcagaagcaactttcctaatacggtctggatgaacaagaatttgtttcatcttcgacatggccttcttgctttcttcaacctgttccggatttgctccctcttcacttacttcttcatagtatctatcaatttgtgcagcttgcgtatcagagataatgacacgagctaaacgtggttcaaaggatatacgaacagtaataccatcatctgttgattccttcattgtatattgatcaacaatttccccgaaaacataaatcgtttcatcaattggcgtcccagtaaatccagcatatgttgcatttggaaatgcatcacgtaaatagtgtgcaaacccataagaggtctcaatacctttatctgtctttttcagctttccttcggtatttgtttgcgttctgtgcgcttcatctgaaatacatatgatattattccgttcagacagcaagcctgtttcttcctcaaatttctgaatagtacagatatatactccaccagattcgtttgtcgaaagttcgctttttaaatcagcacggctttcaatcgctttaacattattatctttaagatatttcttagaagactcaaaaagctcactagtttgattcgataaatcttcacgatcaaccaaaataataatcgttggtgattgaaaaacgtctctatcgtgtgttgcaagcaaacgagataaaaaaagcatggtattagttttcccagatcccgttgcaccaaaatacgtaccacctttaccatcaccagcaggtttcaaatgctgcttgatattttctaacattttattggccgcaaaaaattgtgggtaccgtgtaacaattgctttttcctttttatctgaatctggataatagataaaatcacgaaggatggcaatcaatcgatcctgagaaaaggcgccatcgattaatgtttttaatgcagatatgcccttaacgaccctatctttgtcacttgctttattccacgcataataatactcatatggtgtaaaaattgatcccatttttgtatttgcgccatcagataaaactgataggaaacaatacttagttaagttgggaatgtcacgattataacgtgtatgaatttgtttccatgcatcatagattgtgacgttttccttgattgctgtcttaaactcaaatattgcaactggaataccattaacaaagaccaacatatctggtctgcgttctcgttcaccaacaacggtgaattgattaacgactttaaaaatgttattttcaggatgttctaagtcaatataatcgacgtgaatagctgtttcagttacatcatctcgtattaaatcaaatccttcattgactaagaaaaataaatctctatttgatttatataatgggtcagttggtgcgagcttaattttattgatgattttagcaatttctactttagttaggtctggataccgtttcttcagagaattttttaaatcagacaagagtaaaacttcatcaaacttgcgatgaaggttctccccactcacatattcataaccattatttataaataattcaataatggcagcttcaagtatagcttcatcaaatttcgacataggcttgcccctcccttatcgctccattgattagaattggacaaatatctttgatttttgtttttaactgttcattgagttcacgacgtttgatataggcattgtagatgtctactatggatttttgaatgtttatatctgggataggaattttcacatcctgcatatcttcccaattaaatgtttcccttgcgcttccccaagaattaaagcgtgaatatcgatcgaactcgtttcttctaaaaaacatattcaaatagcttggaatcaatttttcaggacttgtaactttaaatgtaacataagacgatgaacaaattatcgcttcatgagagttattatgtgctaaagaaattttctcaccatttcgagatgttaccgtaacatatgcaaattcatctggttcaacaactaaataattttttagtgatacaccatccattttagctttagtttcaatgaattttttctcaatagataaacctttaacagaatcaacaccgtatcttaatgttccgtttttattagcggtttgctggatgtaagtcccaatcggttcacttggcgtttcacgtctaagtttttcaatcgtcgcatcacataccagtttcaaatcttccagtccagtttcataagattgttggttagcaaccatagctttataaactgccacatactttgcttgaatttcaattggtggtagatcaatgtcaatgtcgcaaaaacgtttccaatctagatttcctcgaatggaggtatctgtacagaaccaagcatatctatcaaattctgatgactgaaaaatcatatttaagtattcaggtaatactttttcagttttagttatttgaaatacaaaataagctgatgaaacaacaatctcgtcatcattagcgttcatggcaactggtatacgttcatcacgtccaacgtgcattagattacaagcaaaacaattatgcggaactaccaaatattttgaagtatctgctccaacattttttgatggcataaactgttttaaaatatttatcccagaaacgtttgaatgattaggatttccatttttaatttttatttgttcaataatatctccaattttatagttcatagccaatccccctgaatgcttcctcaagactagcttgtgatgctttttcgacatttaggacttctttcatttctgcttgaatacgagccatttctttgtcatagtcaatttctaagtcatggtcgatgaactcaacatatttacttggtgcaagtgaataattggcctttcggatgtcttctaatgtagctgctttgcataattcaggaacatcttcatatacatttccttcttgctgccatgattggtagatagacttaacttttgcaatttgttcatctgtcaaaactgtttttttcttctttgtccctttttcaactgagtattgctcaatatgattatcccaacgacgtaaatccacaaataaaacttctttttgacggtctcgaagttgacgtccattgagattgtgtgctttcttattattgtttattatccaaagagtaactgaaatatcagttgtataaaacatgtcgcgaggaagcacaatgatagcttcaactttatcgttttcaagtaatttttgtcgaattttcccttcaataccatcagcatttaaagcaccattagcaagtaagaaacctgcaatcccagttgttacatccagtttagatagaatgtgtaagatccatgcatagttggcattggattttggaggtacagcataaccgtgccagcgagcatcatccgttaactcgttttcttggcgccaatctttcagattaaatggtggattcgccatgatgtaatcaaccttcatatctttgtgttgatcatcagtaaagctcgaactttctccaagcccttgagtacccaaatcataagaaattccacgaattgcaaggttcattttagcaaggcgacgtgtatctgggtttttctcttgcccaataattgatacggcagacttattcccattatgtcgttcgataaatttcatagactgaacaaacattcccccacttccacaggcagggtcatacacacgtccactgtaaggttcaatcatttcagcaattagtttaaccgctgatgctggtgtataaaattcgccttcttcttttgtcgctgacaaagcaaaactttgtaagaaatactcataaactcgaccaatcaaatcatcttcatgaaatttgtcagctgatattttatttatttcatcaataagttgcttgattgtacttactgccaaattaaatccgacatagaagtttgaaggtagtgcaccttgcaaagatttattatctttttcaatatctgccattgctgtatctataataacggcaatgtcatttttattggcgtttttgacaaggtaatcccatcgagtatgaggctcaaggtagaatacgttatcagctaagtaaaaagatttatcatctaaaaacgctggtacatctccgtactttgttttgattttttcacgttgtgtttcaaatttgtctgatgcgaacttaataaaaattagtccaataatcgcatctcgtttatcatctgtttttcctgaggaacgtaagatgttacgaataccaaataggattgtttctaatgtttgttctttcgtttcagctttcttttttaccattgcttttaatctccttcaattacactttattttctagttttgattaaccagaaaactcttttatattctcagataaaaatattgacataacaaatgataaaaaaacacttgcaacaaatagctctatgctttgtgggagcttcttaaaggttaaatattcagcaccattaaaactagttactaattttgtctctttattaaattccaatacaccttcattttctacttgatttgttgaattgtatttgttatacgtgaaatccgtaaacaatctgacgaattgatcttccacagtacccatatgatcaaaagatacttctaaaagagtggctactttttctggagtaacttctgttgatcctcttccgaaatttgataaaagcgacaaaatattactcttaattttaacatttttttcaatacaatcttttagtaaacattcaaataatttgggcgcatattgttttatttcttcggtatttccccacaaaagatcatgattattgctaaagttcaatttattagtaagtaaatcaacatacatatctggtaccaaatatcgattatttctattagttttgcctagagctattttattaatcattttaggatcataccctgttttttcagtagaagtttcgtaatctatctggttagcataacccgctaatttgtaataggttaccttcatactcttttttctagagtaaattcttttagctgctaatgaataaataaactgactagtttcttgaaatatttccttcataatttcaccttcaataaaagtggtgtattttttattattatatcataaaaaaattcaacccaagcaaccgattaaatctatggcaaaattaaatcatcaagaaagagtcgcaatcccttgaataattcatagtgtttgtttgctagtgacaaacacagaaagaggttatttgtatgacaaaaaaattatcagccttcctatattttgatgctgaaaactattttgagaaaaaaatcttattagcaatgcagtctgagccattaaaaaatgaaaatcaagaaattattggcagtaagtacactgtaattgtatgggaagatgctactgattacggcgatcaatccattagtaatattggtgatacttataaagtgaaggtagttggaaaacatttaaaaaagatagatagtccctcggaagttaaattgattaatccctctggaatagtttatggagaatttcgtaatcaattgagtgtttctgctgaagatattatcttcattaccaaggatacaaaataatggcacgaacagtaaaaaagctaactcaacttcctaaaaaaataccacttcaagtaaaagtacttggagtggcatcattaatggacctactactaataatatttaatcgattactagtgtttcttatgcaacacgactttcctgaaataatcaatcacatcctaattatactgagagattggacaaagacaattatccctggattaaccatactaatatttctttttggtattggcattctatatcttcatattgctattaaaaaaagatatgatccttttccttttgtaattcgaagtatttattttgacttttggttacagaccgtcaatctctgtattccactagatcaagaaactattttattgcccaatgtacgcaaaataaaaaagggcaatgataataaccaaaaagcatttgaaatagaaatattagctgatttcaaagaaagaatgttgtcattaaatgatgcaattaacagctatttagctcaccataattcagaatatcatgtgtttgagagctatgaaataaacgggtggatacgatatatattgacaacaaattttgaaaaagagcaattacgaggtgaagatattgaactatagcattcccattaccaaatcaatctattatgatgccgcaaagcaaattaattgcttaattggagggcctcgaggaatgggcaagagttggttaggtatatatatagccaataagctagctactttagaagtacccacacagttatttattattgactataaacaaagtgatgcttctagacttaataccctacttccagagaaaagagtagcttgtacaaaagaagaaatattttccttattagaacacttcgttaacttaatgcatatacgacgcaaattcataaatgataactctgaatttggtgctacagcagtaaacttacaaatgcctttatattatctttggtacgatgagtttggtgcattcaccccaacattaacaaccagtgagaagaaaaaacacgatgatttattatctcaactagttttattagggcggcaatataattttggattattagcgattatgcaacaaatttcagttactaatagtggtttaaatagtaacataaagcagcaattcggaatgactgttcatatgggctcagatacaaaggaatcatatcgtcagacgttcggcaccacctatgaaatacctcgggttaatctctctagagggcaaggcctaatttggatgcaaggagaacgagttattcaacccttttacgctccagatctatcgaacatcgatatttggcaatcgtttaaaaagaatcttagtagtcagaataacgataactatttaaaaatgtgcaaaacaagtgaattgaaataagggcattttggttttaacaaaatgccctcgcgcgcaagcgccctttaacttgataagcggaaaacaagtgaacttcgatcatattggaggtgatttgatgaaatcaaacaatgagcagccttttcatttttaataatgcgcttgtaaaagcatatcgctacggaagaactttagaaattactacctcaaatggtctaaataggcagacaataaaagtactcccaaacaaacgatatgtaatacttgaaactggtgagattagggatatgaacactagtgcagagaatagagctgacaacctaaaagctgtgaagcaaaccatgaaaaaattgcggcgtctcatcgctcataattttaacggtggaaataatcaactttggatcacgctaacctatgcggaagatattactgactacaaacttgcttcaaaagactataaactgtttatgaaaaatctacggaaatttcacaacaacttggaatatatatcagtcattgagccacaagcaagtgggcgttggcattttcatattctcttaaagagtgaaacaactctatttatttctaatgacgaaatagcacgctgctggggaaaaggttttaccaagaccaaacgtttaaaatcatcggataaagtaggaaattatgtattggcttatctaagtaatcttgattttcctgctgaccagaataatcaaagtaagaaatacgccaaaggtgctagattgtatttctatcctaaagggataaggatataccgaagaagtaaaggtattcaagatcctgttaccgaaaccgcaagtaaaaagagcatcatgcagaaaaatcacgcaacaaatcgaaaagctaattactcaacaaagacagttcaccaagctaagactggacaagtaacatatattactgaattttatgatggtttagattaaaaggagtgacaatacatgatagcagataaaattaacagatatccttatcttatgacccgtgaacaagcttcaagttttttaggtattgatccaaagtcatttgataaatacctccgaaaaagtgatcaactaaatagatttatgattggaaggcaagagcgttacactatcgattctttagttgattttattaaaacgaatcaaatttaaagcttactaatggttgatactttgctagaacatgtttacaatgattttgtattcaactagcatctatcaactatttttatgaaaggaattgatagcatggctagtattattaaaagaggaaaatcatatcgagcgcaggtttccttatataaacaaggaaaacataaaaaactttctaagacttttccaacaaagaaagaagcagaactttggactttagaaatggaattagcgaaaggagaaggtaaagaacttgcatacagagcaacaacctttggggattttttcgagaattggatttatcttgtaaagattaatgacgttaaagaaacgacatttcaaaattatgttcgtactttaggggttattagaaacttatttcaagatatccaattaaaagatttaaatgatattgttgttcagaagaagattgatgagtatgccaagacacattctcgaaaaacaacacatgaggttcttcttaaaattaaaacatctttacgtgatgcatatgctcgtggctatattgcaaatgattttgctcgtttagtaaaaacacgtggagtgaatccacctaaacgtaataaagcattatctatcaccgattttagaaaacttcgtaattacgttttacagcatccagaagacgaatttaacttgctagtattacttgcattagaaacggggatgcgacgtggagaactgttagcaatacgcccagagagtctttatgaatacggaataaaggttagacattcgattagtcctacttctgatgatacttcattaaaaacacaaaatgcaaaacgtgatgtttctattaacaaagaggtatatgaactcattcgtaaaattcctgttaaagagaatggttttattttcagctttggcggttttaaacagtcggaacaattagcagagttattgaagaagttaaacattgaaaaaacaacatttcacggtttgagagatactcatgcatcatttctattttctcaagacatagatattgcatatgtatctaaacgattaggacacataaacatacaaactacacagaattattatctggaattaatgccagaaaaaaagcaccagcaagatgccgatgctttaaatctgttaagtgctttataagggttcaagctgatttgaaccaacttgaaccaaaaaagctctgcaaacattgatataccaatgtttctattaacgttttgagaattgtgatgctttacgggcttttttaagacctggttagcccaaccattttttcaaacagcttcacaatactttaatagcaacgatttagagagataaaaacatgaaaaattttattgactttcaaattatttgaaagcaatggtgtcaattttctgcgagccgattcaatactatcaaatacatatacctatactatgaacaataaataaaggtctctcatatatgactgataagtcttttcttttattgatttttttcttaacatctaatttgattactctttttcagagaaaaagctccccctaatttctaacagtagtatgtttatagggtttcgttaccgattgaataattagccattaccaatataacttcagatttttcaacagtagcaatccgttttgttggttcatttttattaattcgtccactgttcaattcaatattctgcaaatcaaaagcgtcgacgtattccttaaaattcatccaaaattcttgaacatcgtttgcgatattttgaacataatcatatagatcactgtctgaatcaataaactcaatgcgctttgctaactcctgaacttctttaccagataaaccaaaagcttcaatttttgatttaattgttccccttagtttgggatttttaatactatctataatattagatgcagctttcttagaggttttatcggctataccgtcaaaattatctcttgttttttgattatcagcattgattttttcaatatgccgctctaaaacctgttggaatttttgacgataatcacgtatttttacctcggctttagcttcactatattcctgtgttgaataaacactcgctacttttgattcattcaatcgtcgctctgcatcagaaatcgtgcattctttaattttatccatatcaataataattgtttcattactgatgtcctcaccattaacatcacgataaatcatttttaaaacaacgatagcattaccaatattttttgaaaaactgatatcatcataaattggatcaagaactcgatgaactccttgttgaacagtatcgtacattcgtttattcgccatatcataatcagcagaatgagagtcagcagatacaccaacattcatgatttgttttgattcgttatccaataccattttttccgtggctttggaagctttcgtagcatttttctctttcagtaaagcttcagcatattctcgatactcaggtagaacaaaatcatcaaattcagtatcactataaatacctttcatcttttcccctaagcgctgtgtcattttcaaaattgattcaattgctgaataagttgggaaagtgtagatatcaatctgttctacttgaccatactcacgaggacgatcgattcgaccgattcgctgttctagttgcattggattgtatggtacatccaaattcattaaaacagtcgcatcttgcagattttgccctgtagaaatcgtgtcggttccaagcaaaatattgatttcgttttctgaattaaataattctgtctgcaattttgattttggtgaaaaacgatttaaaatagcattcttagagtagtgatccatgccaattttattatcatcaggattaccagttactacaccgatgttatctaagtcaaattttttcgattctttgaccttatcagcgtaatacagaattgtatcgcggaattggctcactaaaatgactttattacctttttctcgctcaatgattaaactttgcaaaaccgtttcaaatttttcatctttacgtaaaaaattcttttcaacttcatcaatcatactttgcaaaacagccaaatccttaactgcataagcttttaacgtattaaaaactctcttagaagatttaactgtcagactttcaatttgaccagtaattcgctcgatatattttcgacgatttcgatttgatttttcttgaaattcacgaaattgatttggcagttgatcttcgtcttcttcattcttaatgttcaacaacaatcccaaattatttgaaaaatattcatctaccttataagcatgggatagataatttttcaatcgatctaagtacttgccggatgtttcaattgcgtcaaaatccttaacaaactgctgagtcttagtttgaatcgccttcaaagaatttacgaaagacagccaactagaatcagcacgttttaatagcattaatttcaatctgcctggcgtcaattcattattactatcttgaacaaagaaacgtagtgtatccatatatgggaaatgtagattatcgattctttcaaagttattgctgaaaatttgttctttcaccggctcgaagggaacttcaatcgttggaaaaaaacgttcagcaaaagtaacagattcgccaccgtatgttttccttgtccgctgcaagaataaatcttcccaaaattcagcaaaggctttattatcatttgccaacgctttaactgcttttccacgtgctccgaaagcaaaataagtacgataagtacgatcaagtgggatgttatctacttctagaaatagtgaaccgatattaatcacatcctcacgcttgttgttccaaggtgtcgccgtcaacatgattcctttcatattatgagccgaatgcgaaaagacatattccgcatgacgatatgctgcagtagttctatttttaaatccttgatgtccctcatcaattacaatcatttgataagttgcagcaatcagatccaactcagctggtttcattagagcaaatgtttcccgattgatgaatttaaaattactgtagtcaacatctacagcatctaaatccgcttgccattgttcatgtaattttttatctgcaataatgattacttttaaatgagggttaatttttttctctaagcgtattacgccagctgttgttcgtgtcttgcctaaccctaccccatctgctaatgttgcagtaccaaactgcattagcttgttctgaatttttaaaatgccttcacgttgatgcggatataaagtttcccaaattttatcgtcatctaattgagcatatggacgagcaaacatattcgcaaaatcataataagtttcagaaactgatttatagcgtttagattgctgtatatctggatagatttgtttgattgtcttgattagttcatctgaaaaaacatcgacttcatctgagaaccaaatcgatttgaaccactcatgcaaagcattaaaactatcagcggaatagacatttaattcggtattcccttgcagaccatttctagaaaagtttgaagaaccaactaacgattcaccagagtagtcattttctttaccataaaacatataactcttcgcatggaaataatttgcttcaccagtataaactttgacttcaatccgcttttgttccagccaatcaataaatttcatcaaaaacagctgatcttcttcgttcaaataccgaatttcgttttgaaaatgatttttatagtcatttttcagttcgtcatcattcagttcactgatataaaaaccagcttgaacagtatttttggtcagttcattcgtctcatttcccatcaaaatgctcatatgaccatcacgtacttccataaactcagtgaaagtatctttgattagtagcaagccggatatataaaaatatccgactgctaaatcaaaccgatcaactttattttggctaagcaaacgattgattgcaaattccatagaaacattgcgattatcaactactcggcttttataaagagcttcgtattcttttgtcactattcttcacctgctttaagacgatcatatacttcaatgatgcgttgagcttcttcttggacagcttgcttgcttttttttccttcaaaagttttcatcaaagcaataatttcttctcttgataactcaaaatcaatgaagattcttgcattcagttcagcaataagctcatcaatactcattttggaaaaaaagctatcatctttaatgacactatttaatctaacgtacatctcatcgttatttttttgaagcaacgtcttcgaaatttgtattaactcatttgtgtacttaaattcatttataattggcattggtgtttgtttaacaaaacttatgctaacatgcttatcaatcacatttcgaagtagaaaatcataaatatagctattcattatacctaagtaaaacaacttttctttcaaagtagtattatcttcactctgtacattcatcgagttgactacaactgatttttccggtaaaagtgttgctattactgttcgtttatccgtggctctagcaacatctctatatgcaattctgaaatctttatacatgtttttcgatcttttttctgcattttctattttcatgaatattgatggtttattcgttattttaaattgatgaacatcctttcctccgtaaactggaaccgaatcatcatcatcatcatcgttcaaaattgatgaaaagtttgttttattaatgccctgagaaaaattcagtaagttactttggtgtagtggtggatacttagtttttaattttttataaatactaaattctatctcagaccgcggttcgaataatgataatttttccggttcagtatcataaacgatattaatcggataacttaattttttatcatcttgataaacgtccataatttcatttttgtaaaaaaaagcatcaaagtgagttactttaccggcacctttagcaaatgtcagcactgcaaacttataactactatgaacaaattcaaaaatctttttgatattctcaaatgaaagaaattcaaaaatattacacttttcaaaaatcaaatgtcgaatccctgttgaacccaaatctgtcataacattatccggaactaaaatagaaattcggacattattcttaactaattgggtacttctttcaatgaaatatctgtataagttgggtttacctccagtattgacacccagaactttccaactttgataaatataactatttgattttttgtaaaatttattcatttttgcaaaacgttcattatattttccccacttctgttcaatagcaggaaattttgcaaataattgttttttaacagcatccttttctttcttttttaacgaattgtatcctaaactatacttggagaaaaattcgtcactatttgactttacttcgtcccatgggggattcccaatcacacaatcaaacccagcattctccttcaacttcccatcttcaccaaaaaatacttccggcaaattaacttccaaagcctccacgtgcaaaaattgtgtctcgccattcagaatcggctgtacatattgtaacaaagtccgctgcagctcttgtcgtttgctttcatattttggcgattgttcacgtttcagcttcaaaagcgctttgatttctttttgatagttcgtatagattatttcgcgctcataaaaaggtacagagttcatcaatgagttttgatggatcaaagtattaccgattagttcaggtaatttttgattaactggacggtgctgtagagatgaaagcatcaacgtcagtgacgaaattaaaatcgctttgtaatcgatgtcaacgccatagaccatattgtgcagaatatatttttcccaagcaaaactgccctcatcaccagcttgcatcatcggatattttcctctaaccatatcagttacttttaatccaacaagtgcatcatgcttctcagctagctgtctaaaagcaccacgcaagaatgatcccccaccagctgtcaaatctgctattttcatgtcaaacaagtaatccaacgttttgataatttcagcttctttaccgtcttttatagcttctttgacgtctgcaatacggttttggaattcaacttcaacagtctgctgtaccatgtattgaacgaatttttcgtcggtatagtaagctcctttattcttctgttcctgcagatcttctccataaaaaacaatcggcttaccatcttcaattttgatttggacattttgcgacatggaattttcgtattgtttttctagcgcttccggcggcacatcttcaaaacgaaaagaatagttttcgcttgatgtatcgatccaaaatttcgcccacatttcagcatcgtgttcaacaatcaacttttcgatttctgtcgttacctcaccgattgatgaagcaaatagatcaccgccataaactgtttgaaattgtcgggtcgctttatcttgaagttcaatcaaacgtgttttgctgtcatctttcatttttattttactagtaacatcatattcgtcttcatcaaataagcttatttcaacataatcatcgtatttttcaatcacacttttctttttgttcagcttatagattgctgattcagttgatttatccaagtttgaataaatttcaaccgtttctttgattgcttcatctaacgtacctcgtccaacgcctagcgcgattccgctcaattcgaaaggacgcacttcatctttgccataataagcttcgataaaccggcgcatcagctgacgcaagatcattgtatcaaccacgttcgacaaaactgctgtataagattcgtcttcgaccaactgcgctaaagcatttgtaacgatgtatgctcgagcattatcagaaaccaatggagctagttcgtttttataaggtttagatgtgattaactctgataatttttttctatacaaagctaccatcatcaagaagtgattcgttagttcacgtttgaacacatctttcaatccatgaataacatacccaccccaaaaatcatcttgttcaactgtgatagagctatttttcagcatattgaaattatctagatacaagactttcccaattgtttcttcattaaggtccaaccgctcatcacgattgccgtttctcagccggaataatacaattcttttttgtccgacaaatccggcaatttccgcatcaaacgatccaccaaaactcactgcaagttcctctactcgtttatgcaacttccgaatatccattgtttttgtctctagagtcaagtcagatacagtttttaaagccaataccgcgcttgttttatctgggattttatcagtaaacaacatacgccattcactttctggttcgtttggattacgtcctactgagtaacccaagtaatcggcaactatctgtattgattgctcatctgcggtcaaactttttaacatttcctcgatttccatttttagtttgctcctctgctcctgttcgttcaaataacctttaaattttattttctgaggtacctatctttatagctggctattcccaagtcagatttcttaccacatcctatggtcaatcttgaagaattaacttaatattgagccgagttgcaactttccccttagatagccctatccgttgtcggttcaacctcaattgatcacctagcggcatatcatcaacccttaaattcaattaattttacttttcaaaccaatcttcaagctgatcagcactaattttattggacagattaattaacgccggtcttaacgtctgaattgtttccaccaactcttccccaccaaataatcctgtaaatgacttatctgtcagctcttcagataaatgattaattaattcgccagttttttgttgatctgccaagatattaattagtttccccactaaatattgatcttcaaaattactatctgcaaaaaaatcatacttatcgacttctcgtgtaactattttaatcatatcatcttttttctcataattaaattcaccagctacatccatatactcgatgataccgctcgtaataacggtgactgcctcatctttcttctgtttagataattcatcggcaatcggtaaattttttatctgatcacttaccattttttgaatttcttcttgaatgacttcttgctgcagttcataaaaataatcatccataaactcttcacatggataaccaacttcattttcccatgcaggatttttaaattccccagtgtaaaactcttctttgattgctttcacaacttcaggatgttcttgcacaatcctgttctgtccttttaactgcaaatagtccgaaatatattcttcaacgtcaccaaagtaaaaccagcctactggtttcccactaatactcgataattgattaatgacactttcaggggctaacgcataaccttgaacatacgagctgattgttggtttctttatccccaagcgattgcccaactctgtaaaggacaaattcatactctctttgatttctttgattcgttgtcctaccttcactttatccggttgtaataaaccaaacatagattacttcctccttgtcatttttactcattatatcactcgtataaaatttcgtatatattttttactaattctcttgacttcgtataaacaaacgtataaaatacaaatcatagatggccgtctatatttttttaaaccaatcgtataaattatcgtatatccaagaaggagggctattatgccaattaaaatcaatgatcttactttaccaaaagaaaaactcgaaaaagaataccaagttgtcaatgttactcgctggcaaaaagacggagaaattttaggttggagttatgaatgtatcctaccaaaactccgctacgaaaaaatcagtgtcaaagtcaaatctgaaaatcccgtgattactccggaagaacttacccaacaaggtttagccatggttacatttgccaatttagtgattgcaccttggggtcgctctaacggtcaattcgttagctatggattatcagccacggcagatgtggcaactttgattccgaaaaaacaaggctccactacgcaaaactaattcccctgtggggttgttgggtggttaggacgggaacggcggggcagcgcccacagagccgtttctgtcctttaaaaccgcccaataaacacataggctggaaggactgctttgcaggacttccccttaacttgatttatagaacaacatcaggcgaaaaatgatggttctttgacaactgaatatacatcaaggagtgatgatttttgaaagcttataatcagaaaatcattgagactcccacgtaccttgaaatttatgattatgaagcaatcattactcctaaacaaaaaacaggaaatattgaaaccaatccaaaacaaaaaaaagaattagcttggctttatgaagaagaaaatccaactagcaataaaagaaaaaactatgatgaactatccgctcaaggacaatacgacagcttaaaacgaaaacaaaaatactatcaaaatatgcgttttgaaattgcccgactcgtagatatgaactttgacaatcgatcaaaatttttaaccctcactttcagagaaaacattcaagacattacctatgcgaataatgaattcaaaaaatttatcaaacgactaaactacgaactctatcacacaaaaaaagcaaacctgaaataccttgccacgtgggaaaaacaagaacgaggcgccgtccattatcacatcatcctgtttgactttccttttatctctaacaatcgccttactaccatctggggacatggatttgtcaaaatcaacaagattgatgtcgatagtatcgaaaatcgcgggcgctatattagtaaatactttgataaggacttagatttgaaagagcataagaagaaagcattcttcaaatcccgtaacctcaaagtacccagcgtcacaaagcaactcgtggatcaaccttttgataccacaaatcaagacgtgctttataccaatgagtacctcgtaagacgcccaattttttacagtgctgtaaatgaaggtggaactccagaacaagtgatggattttcaagaaagcactgttcgctataccaagataaaaaaataattcattattccctacgcaaaattcaaaggaagtgagaacatgaccgaaatgaaaattttactcagtgatgatcagatgggcatcatttctactcaactatctgatttaatcacaactgaaatcgaaaaaattaagacacaggaaaacctgcaacaccgctatatgaataaaaaacaaacttgtaactatctacaagtttccaataatacgttagatggctggattaaagagggcttgccccttattcaaatccacggatcaaatagatttgaccgtatcgccattgatcaatggcttgcaagcctagcaaaataattccgacatcgttatactccatatatagtatttgatttcggctcgcaaactcggagggaaatactatggcaattagcaaaacagaaaatgaaacttaccgtttacggctttactatccacaagatatccaagagatgataggtgtaaacaaactttattccaaaacttttaaaactagaaaggaggcaaaagcagcagaaattgatttttatgccaagattaaagagctacgggaaaacaaagaaaagaacgcttttgaactaggtggcgaagcactgttcaaagatttctatgaagatatctggattgatgcttatacagctggcttaacttctcgaaacacaaagtctcctactcctgtcacaatcgcgaatacaaaagatatttttcgacttcatatcttaccaatgtttgggaaatacacattgaactatttgaatcaaaacaaagccttcgttctaaaaatcatgacgcaaaaggctgccgaatacgcaaacttcaaaatactacgtagctacgttaattctatttttgattgggcggaagagcttgaatacattgaacgaaacagactggaaaaatcactgaaacggatcaacgctactaagaaaaaccaattacaagaagcaaaaaaagaagaagatttatacctctcctttgaacaacttcaagaatggctaactgccgttcaaagcgattatgaaagtgggaaattgactttacaagactatgtattatttctgactactttctttttatctgatcgcaaatcagaaacttatgccatcaaatggaagaacgtgaatttcactacttcccagattacgattggtaaagccttggataaattcggcaatgaaaaaagcaccaaagggaataaaacgacaattttccatattccaaatgaactaaggcaattacttcaacagtggaaagtccaacaaaaagaagaactagctcaatttgaaatcgaacaaaccgaagaacagctactctttaccttctttgatgataaagggaatatcaatcaaagacttcatacagattatttgaactaccgtatgaaatccattgagcgacgacataaacaccttacccatgcgactccacacaagttacggcatactggggcaactttagccaaacaagctggtatcgctctagaacagatttctgaagcattgactcacagcgataccaacatcacaagaacttatgtaaatacaccaaatgtgattcaaatgcctattggtgaaattgcctatcgtaaattgtctcaaaaagagtcagaccggaatggtgtcaacaatggtgtcaactcaaaaaaagacgcttcgcaaaatgaattgcgaaacgcctgaaagtactgatatgaagctgtttttaacgttttgagaattgagatgctttacgagctttcttaagacctggtttcttacgttcgaccatacgtgcgtcccgagtaagtaaaccagcgcgtttaagagctagacggaaatcaggatctacttgtagcaatgcacgtgcgataccgtgacggattgcacctgattgtccagcatatccaccaccatttacgtttacaaaaacatcatatgatcctttagtttctgtaacgccgaatggttggttgattacttcacgcaagtcagcgtgtggaatgtattcttcaacatcttttttgttaacagtaattttaccagtacctggtactaaacgtacgcgagctactgcatttttacgacggcctgtgccgatatattgagcttgtgccaatgaaattccctcctattagattaagtttgtgatgtccaatacttctggttgttgtgcagcatgtgggtgttcagcgccagcataaacatgaagtttcattccttgtttacgtcctaaagtgtttttaggaagcatgcctttaacagaagtttcgatcaaacgacgagaatttttagcacgtagttctcccgcagagactgatttcaatccgcctgggaagtttgagtgacggtaataaattttatcgcttgctttgttacctgttaatttgattttttctgcattaatgacgattacgaaatcacctgtatccacatgaggtgtgaatgttggtttatttttaccacgtaagatagatgccacaactgctgaaagacgtcccataggaacatccgttgcatctactacgtaccatttacgttctacttcgcctggtttggccatatatgttgtacgcacgatttttttcctccaattcaatttcacgaatgtttgacatacacttgagtttccggggctctcgtggggcaaacaataccatataacataataccgtcttaagcgccacatgtcaacgtgtttcgcagtttttttgaaatttcccttcaattcttttccgaaaactttcagttgttattctgaccaaacagactgcacttttatacacattttgcgcataatttgtatacttcctgcaataagtatctctggtttttattattatatcaatctgtatctatatccttgctaaacacaagaagaattcattgtataaatatttactttttctcttgatttcttatttttattctgttacgatagcttcatcttacttgaacttaaggatgggagttaatcattatgaaagaaaaagtaattttagcgtattctggtggacttgatacgtctgtttccattaaatggctgacagatcaaggatatgatgtggtggcgtgctgtctggatattggcgaaggccgtgatacacaatcaatcaaagacaaagcactcgatgtgggtgccatcgaatcctatgcgattgatgcccgagaagagtttgcccaagactttgcattgattgccttacaagggaataccttctatgagaactcctatccgctggtctctgccctttctcgtccattgattgctaagaagttggtggaattagctatcgctacaggagcgactaccgttgctcacggctgtaccggtaaaggaaatgaccaagtccggttcgaggtcgcgattgccgcattagcccctcacttgaaagtcattgctccggttcgggaatggaaatggtcccgggaagaagagattgcctatgccgctgaaaaaggggtgccgattcctgccgatttggataacccttattcgatcgatcaaaatctttggggccgggcttgcgaatgcggggtcttagaagatccatgggcgactccccctagaggcgcctatgccattacgcaagaattggaagatactcctgatgtaccgacgatcgttgagattacttttgatcaagggattcctaccgcattggatggcgaaacactgaatctggccgaattgattatgaaaatgaatcgtctagccggcgaacatggtattggtcggatcgaccacatcgaaaaccgtttagtgggaatcaaatctcgtgaagtctacgaatgtccgggagcgatggctctaatgacagctcataaagaattagaggatttggtttttgttcgcgagttggcccatttcaaaccaatcatcgagcagcaactggcccaagtaatttatgatggcctctggttcaatcccttaaccgatgccttgatcgcttttctaaaaaacacacaagtctatgtcaatgggatcgtacgtttgaaattgttcaaaggcaatgtcatctgtgaaggacgtaagtcagagaacagtctttacgatgaaaacttggcgacttatacgtctgccgataccttcgatcaacacgcggcgatcggattcatcaaattatggggactgcctagcaaggtccacgcagagattcaggcacaacagcaattaacagaaacactgatttagtcaataaggtgactttttccttttgagggtgaagtcaagtttctttcgaggtgagcaaaatggcaaaattatggggcggtcgtttcgacggcaaaaatgaagcatggatcgatgcctttggagcgtcgattcctttcgatcaattattggcaaaacaggacatccaaggcagtttggctcacgtcaaaatgctgatccacacggggatcattgatgaagcagatggcaacaaaatcattcaaggcttgttagcgatccaagaaaaattagcggatggtgaactgaccttttcgattgagaacgaagatattcatttgaatatcgagacctttttacatgaagaaattggacccgtcgctggcaaattgcatacggcccggagtcggaatgatcaagttgcgacggatatgcacttgtacttgaaggatgtggtaaaggaagtcatcgacttgattgcggcgttccgtcacgtactagtggagcaagctgaaagcaatatctacacgatcatgcccggctatactcacctgcagcatgcacagccgatttcttttgcccatcacttgttagcctattacagcatgttgacccgcgatcaagaacggtttacagaaagtctcactcggatcgatatcatgcctttaggcagtgctgcattggctggcaccacattccctatcgaccgtgcctatagtgcggaagcattaggttttggctcgatttacagcaatagtctggatgccgttagtgaccgtgattttattctggaatttttgagtaatgccgcgattttgatgatgcatctttctcgtttttgtgaagagttgattctttggtgcagtcatgagtttcaattcgtggaattgacggatactttctctacaggtagttcaatcatgccgcaaaaaaagaatcctgacatggcggaattgatccgcggcaaaacaggacgtgtctatggcaacctttttagtttattgacggtcatgaaaggtctgcctttggcttataacaaagatttccaagaagacaaagaaggcatgttcgataccaccgaaaccattgtgaaaagcttgcagatcatgaccggaatgatccaaacgatgcaagtcaaccatgagcgaatgaaacgttcgacagaaaaagacttttccaatgccactgaactggcggattatttagcaggtaaaggaattcctttccgacaagcccatgaaatcgttggtaaattggtgagtgagtgcctcagtaaaggcatttatctacaggatatcccactagaagagtatcaagcagtccagccagtgatcgaagctgacatttacgataaactggactcttatacggcagtcaagaaccggcattcttacggcggtaccggatttgaccaagtcaaacaacagatcgaagccgccaagcaatccttggcattggcataaaaaaaaggctgcagaagaactagctaaccaaaataatctcaacgatgataaatgaatggtgtgatccattacctatttgcgaatcggttctgctaactgcagagacaatctcatcgtttgattattctgtttgctgaagggcttctgtcaaagccttttttatgtctatcagaaatacgaaagcctgtgctttataaattctgatagtgaaaaacttgttatcgttttcctatacaagtacctgttggattaagaacaactaaccttttgattgttacctatcttaatcaaaaatcatctaatcaaaattcgtatcctttagcaattttcctgctgtattagcgactcgccaatcgctccccctggatgccattgcacatacatttctggggttaactttcgagcttcttgcaagagtagcgatagcttttgtaaaacaatgatttgtaccaaaaccgataagcgaggcggcttgttcaatagatccccttctttatgaactgccgcgcatagggaaacatccgataaatgactgagcgtagagtcacttcttttggagacgccgataatttttgcaccattattcttaagtgtctcaactgtatagagtagttctttggtttccccactgttagaaatagcgatcactacatcaccagcttttacttgaccacttgatccatggaccgcttccgttccatctaaaaaatagcttggcgtaccggtggatgaaagcaatgaagcaatatatcccgcaacataagagggttttccgatccccgttacatggacgcgtcctccgtcagcttctgtttggagaatcgtctctttcgcagcttctaaagatccttcatcgattttgtccatcgctaaagccaattcatctagtacacactgatcataactcaatcccattctttcacctgatttctatttattgaaaaccgaataatcttttgtatccataggtgtcgtttggaagaaaaacttgacgcctttttcttggatttctcgtatagctgtcatttcttcctgagtgaaatattcatcgattttcttcaagagaattcgacttgctggataaggaagttgcacttcttttgaagaaaaccccttattcacagcctctcttagcgcacaaatatttttgaaaataatcattacattgcatttttcttccgtgtcctgtgctaaaaattccaataattgatcgactgagaagatactaactttacttttattagaaaagctaagctgcaaaactttctccaggaaaggatcatctttatgagtaggatctacaatcgcgatataactagcattaatgaagttgttccaattcaatgccactgttgcatgcaacaaccgtttgtccactctgactaatttcactttcttactcatagatctcacctgcctgctcacgcttgtcattatcacttaaatagttagctagtaaataaaactggatcttaccttgaaaactcccacgaatatcgatatgaaatagttcctcaaatcgtttgattttatacactagagtatttttgtgtaaaaacaaactttctgctgtctgtgtcagattataatcattagtgtataaatgtcttgcaatactgatcagttcagcagtatcaattttgttgattcctccattaaaataatcaaacagattcgttacttcttggtgaggaactcgatttgctaggtaattaaggacgtagtcccaaaaatggtaaatcttttgtccttccattgcaaaatttctcttcagccaatatgtatgttgatagcttgactggaatagccgcaacttattttgcacactgcctacataaaaatagcagtcacttaatccccattcttgcagatcgcgaataaaactgttgagatagtctttgaccgtcagctccatcaaattttttgggatgactttaaacataattatctcattatctgccatcaatgagtaaatagtctcatcttcattgattttgtactttaagtttgtcacttcttgcacatcaaaagctgttcctttgactatacggattgctactcttggctttgttccatcaatgtgcagttcttgaacaagacgcagaacttcgtcaatgctaaaattcctcttggcaatcagtgctttgatcaattgttcttccaaacttaaactttgtctagcagcttcttgattcatttcataaataattcttgttttaagcgactctgacagcaaatttgccacaatacttaaactatcatcctgtccatttacccataaataaccatagtctttctcttcaacagcaattttatagaagtggtcgtctttaccttgttgacttaggtcgatcaaagtaccattttttcttttatcgctactggaaataacttttccataattatctataaggccaatcgtatatttgggattttcttgtacaacaaaaataaattctttaaaaatttgctccaaattcattatattcacctcaagctaaaaaatacggatccagcataaacataacatttcttatcaacaaatttttaaagaatcctcacacttaatcaattaaattgtaatactttagcatagacaaaattttcctgtcatcggatgctgttgtttctttcactggtcgtcgagcgggacctacttcggcaatcgcagccaattcaattgctctttttaatattgaaggtactgttcctaattttaatgcaccacgtaattcttcaatgtcattttgtaatttctccgctgattcccagttattccctctgattgcctgatccaagctcacgatcgtttccgtgattaaattgcttgtaccagcaattgccccagatgcgcctagtttatagccggctaaaattttcgagtcagatccaaccaacacgttaacctttgtgccctcagttacttctaggtagtcctttaagttgttcaagtctccgctgctatccttgattcctaaaacattgggtaattttgtcaactctctcaaaacttctttcgaaatattacatccagtatttttaggaatattgtatagaatgattgggatctgtacactgttcgctaccttttgataatgctgcaaaatttcttcatcagatggggttataaaataaggcgttatgacagataaagcatcggctcccagtgactccgctttttgtgatagttcgatcgtttcttttgtagaacatgcgccagttccaatataaacaggtactcgttttgccacatgatcaatgaccgcttttgaaaaagccattttttcttctgaatttaacacatgaaactccccgttacttcctaaggggaatattccagacacacctttttcaatcagatgatccaccaagttttccattgcctcataattgatggtttcagctgtatctctatgaaaaggggtgacaattggggtaattattccttcaaacatcttttagtctccttcactcaataactgttcatttgttaaaacaacactttcttttgcaaccgtaaaacaactctcaacaaacgcatccagatcaatcgtctcggcagttgtgcctttcatatataaatcaataaacattggcaagtttacaccagtcaccactttatgctggtattttttggtcaacgccgtcagtacattggagggtgttcctccaaatagatcaactaaagcaatcgttggcccactaatggtttcaaataattcattggcttctgccaaaaagttttcaaaagatttatcgggaagcagtgataggctatagacattcaccgtctttcctacgatcatttcagccgaacgaatcaattctgcgccaaatgatccgtgagttgccacgactagattcaatttagtcattttctctctccttcatagtttagcaatttactcaaaacaatatccgttgaaatttcgcaagttctggcttcggattcaatcgttctggcacctgtatggggtgttagatagaagttttccctcgcaagcaatgggtcctcagatttcggcggctctgaactaaatacatcgaaacaagcactgcgaatgactttcccagctaaagctttagataacgcctcctcgtcaacaatgcctcctcgtgcagtattgattaaacaagcattatctttcattctgtttaattcagcagttgagattagatttttagttttttccgttaaaggtaaatgtagggagacgtaatccgattcctgcagcaatgtttccaatgctagttgctctgcatcatactgtttcagctcttcaaccggcacatcataaacgtcataaatccgaacatgcatcccaacaccctgtgcttgtcgtgctaactgtttcccaatcgcaccaaatccaatgataccaattgtttttccatataattctctgccggtaggtttctgccattctccttctttgacttcacgaaccgtttcataaatattttttgattcactgtaaattaacgccataacatgttctgcgacagcgatagaattagagccaatggttcgtccaacataaattcctttcgattccgcgtaagcaacatcgatgttgtcggttccgacaccgaatttgcaaatcacttttaactgtgggcactgatcgataaatgcctgatcaataagatcgacaccaacaataatcccatccgcatcctttgataattcaagaaatttttcaggtgaataagcttgaccagtgttgttataactcacttgaaatccgtgagaacgcagtttgtccaattccttttccccataatttgcaaaaccgcgaggtgtaatgactatcttcatttgcgttttctccaatcttccttacaaaataccaaaaaaggttagcgcgattgcaaagagcatcgtcgcaataatgatctgcaggtatttgggtccttttttcatgatataaaaatacattgccataactaaacagaaaggcagaaagctcggtagcataccgtcaataatttcttgaaccgaggttgtccctgtttcattgctaaattcaagaatcgtcgaaaaattgacatacgccgcagacagacacccaatcataaagagaccaacaatactcgcaatgtcgatgacttttttgattgatccagaattcaaaatatttaatacagaactctttcctagagtgtatcctttattaatcaaaaaccatgaccagccaaaactccatgcgatgtagataactcctgggataaatgctgctagaattgatccgttcaaagccataggtacaaaaatcgcgagtggtattgtagctacgataccttggtcgacgctatcaccaatccctgctaaaggtcccattaaaccaatttttaacgactcgatgacttcaggtgtaatctcttcatttccattagcccgctgttcttctaaagaaatgacgattccatgaataatacttccccaatcacaattcgtattaaacatttgtacatgtcgtttcatcgctgcttgtaattcttctgggtcatctttataaattttttgaagtgtcttatttaatgaatagctgaaagctaaagcctgcattcggtcaaagctaaccggaacctcgacagctaatgtccatttccaccatgcttttaacaaatccaatttcgtaacctttttttcagtagcaactgtcatttctgcactcatgcaaattccccctcatcagaattttgtttgaataatgaactaatcattgcaatacatacagcaaagactgcccctgtcaacattgagaatcctagaactgcatacataaagaaccctaaaacgaaaaatggtaaatattgttttttacccatcacgaccagagtcaatgcaaatcctaatgccggcaacattcctcctgcattggctaatccattcattaaccattccggaataacatttaagaatgcctgaatgacatttgtgccaaataaggttgcgataaataccggtgtaaagtatagaacaccgttcgttaaccaaggaatcacgaaagagaataaagacaattgatcatatttattcgcttcaaccaacgcatcagcacgcgtattataaaatgagttgatcgtacgacgaacattgttgatcaatacaccaagtacaccgaatggtactgctaaagcaactgctgcgctagcctctagaccactagctaaggctgctggaatagcgatacatgctgctaaagcttgatcgcttggaatattcccaccagcctcgatcccacccatgtacatcaactgaatcgttgctccatataatagtccagcttgaacatccccatatacgagaccaataaaaacacctaaaactaccggttttctaaaggcaaaagaaacgaagtaactcgcacgacccattgctaaccaataaattaaaccgactaaagctgattgaataaccatgttttcactccttactctttatgctaatttttttactgcattttgaagtgtttctgaagggtaatctggtgtcgtttgaaaatagacattgattcctttagactcaatcgctaataattgatcggcatctttgcgatcaagcgtaatggcattgttgactgcctttctaccagggcccccacctaagccgccaatttgaatttcgggtaatgccaaaccggcgttgatcgcattggtcaattcttgaacactttttagtaaaaccaaaatacgatttctctcaaattcgccattttcttgcgctgcgacagcttcttcgacagaaagaatccgaatccgaacccctttaggtgcagccattttaaaaacatcttgcataaactcatctttgcttagtgctgtatctactgtcacgatttcgttgatatcacattgctttagccagcgagtgatcacctgtccatgaattagtctaaaatctactcttgtcagtgcaatactcatatattttccccttttctttcctattacttagtaagcggtttctaattgttgcttgttaaatttcctttacccactcttttttccaaaactacttacggtatttttggacgacagtatgaatcgcttccgcattggtcgtaatttctgccaccgttccttttgtcaataggctcccgataccacagacatcaacgccacgttgtagccatgtttctatgttctcaagattgatcccgccactagctaaaattggcatatctggaatcggtgttttaaagacagttactagtttagaaccataaaaatccgagattggaaaggctttgatgaaagcagctcccgcactcaatgaatcgacagcctctgtaaaggaagtacagcccggtgcataaggtatttggtatcggttacatatctttgcaacctcttttgaataattcggtgcaataataaactgtgcaccatgcagtattgcatgtctggctgtttcgctatcaaaaactgtccctgcacccacacataattgatccccatatttttctgtcaatttttttatgatgtcgccagcactattcaatgtataactcatttccatcactggtacaccaccggcgatacacccatcagcaatttcacacgctcgttcaaaggattccgtgcggacaattgctaatgcaccggtttgatagattctctgtgtaacactcatttttttcatcatttctcctcacctcacctataatttaaatcgaatgggaaaatattcatatgtttgaacaaacgaaaaaaatctccttttttggatgacagacacaatccacttgatacgaaagcgttttctatcgcttttaaaaaggtattttttagcaaaacaaccctgtagtagtggactttggaataaaaaattggaaatcgaaagaagccctgatcattaataaaggacagatttagcgtaaaatcgttcatttaaccgaactatctgaaggacaggttctttagcaaaagaaaaaaaccggaacagaagtcacacttctgttccggtttccactctatttatacagtttgatcagaaatcttttttatgctcactgaatcaatgacgcacacgtgattttgctggatcgatttgaggcgcttcacctaggtgcgcttggatcatccagatacgtttttcagtatctgttttgaagccgataaagatatcttgtgttggatcatcgccttcttcaccactgacttcaatccctttttggtataagtcagctagataacgataaccttcaacaagtgtagctaaacgttctgggatcgtacggtcccagttgccgatttcatcagggatttgtgtattgtctgccatttcccgtaatgttgagtatggtgagccatctaatgtgatcaagcgttcagagatcacatctaattgatcattcaagtcatccataaaatcatccatcattggatgtaaagttaaaaagccaggtcctcgcatgtaccagtgtgtttggtgaacgaccattgccatttgacttaagtcagcaacgagttgattcaacacttcttttgtttgttcaaatttcattacgattcctcctttaaattctctatttcaagcatagtatgaatctaaaaaaaagtacaccaaaacctactacttgagaaaatttctcagcttttcacgtatttctttatgaggcaaaggaggaggagacagtgtatctgatgtggggatatattttaggtgcagcggtatatgcgtttattcaaaccatttactggcaggatgatccaagcgaatattttgatgattttcatagaaaacctcctattttctattccgtggcccaacagccattttttccttttatcaagcatgctcaagttttattggattgcactgctgctagtttattggcaaaaagcgtttatgcttggctgatctggcttgctttcctacaaccatccgtaggggagtgttggctggcgttggtctggttgaacagtgcttacctcctcactttgacagatctctacgattatagtgtcaagggagagattctctatccttctttgtttttattggcttttaccaatctcatgaacgcacagccttttcattggcagaacttcctgctgcttctgccattattctttttcgtttggcaagaacagctgggagatggtgacttattcttgattggtggttgggcgccttggctgtctacttaccaactcctgtggctgttgattatcgctagctgctgcgggctcttgtttttttcattgcatatgctgtttgtcagaaaccaattacgaatgctgccctttgttccttgtttgagtttagcattagtcatcgtgcgtttcctttaacaaaaaagcccgctgtttcattagcgaaacagcgggcttttgtttagttttggttgttcaatgcatcttctgcagccatttgcgcttcaatgtcggaaatactatagacattttcactcgcaacagtgacttcttttggttccatttcacggtagcgagccataccagtacctgcaggaataatcttaccgatgataacattttccttcaatcctagtaatggatctttcttcccgcggatcgcagcatctgtcaacacgcgcgttgtttcttggaaggatgcagcagataagaagctgtttgtttccaaggatgcttttgtgataccaagtaagactgggcggctggtagcaggaaccccgccggcaactaatgtgttgtagttgcggtctttaaagtcagcgatatccatcaatgttcctggcaagatgtctgaatcacctggatccatgacacgaactttacgcaacatttgacgaaccattacttcgatatgtttgtcgccgatttctaccccttgcatacggtaaacgcgttgtacttcacgcaatagatagttttcaacagacaagacgtcacgtacttgcagcaattgttttggatcgattgatccttctgtcaatggtgcaccacgatggataaagtctccttcgaccactttcatacgtgcggtaaatggtacagtataggtccgagtatcagtttcccctttgatcgtcacttctttcgtacgagtagacgcatcttcagagatatcgattacttcaccggtaacttcagtgatgaccgcttgacctttcggattacgggcttcaaagatttcttggacacgaggcagaccttgagtgatatcatcaccggctaccccaccggtatggaatgtacgcatggtcaactgagtacctggttcaccgattgattgggcagcgatcgtaccaactgcttcaccaacttcaacttctgaaccagttgccaagttacgaccataacaatgtttacatacaccatgttttgtattacatgtaaagacggaacggatcgaaacagtttcgattcctgcgtcaacgatttctttggcaaggtcttcagtgatcaattgatctggtccgacaatgactgcaccagtctctggatggatcgctgatttacgtgtgtaacgtccaatcaagcgttcttccaatgattcgatgatttcgttaccttcacgaatggcttgaatatctaagccacggtcggttccgcaatcttcttcacgaatgatgacatcttgcgccacgtcaaccaaacgacgagtcaagtaaccagaatcggctgtcttcaaggcggtatcggtcattcctttacgagccccgtgagtagagataaacatttctaagacagaaagtccttcacggaagtttgaaatgatcggtaattccatgatttgtccattcggcgcagccatcaatccacgcatcccagcaagctgagtaaagttggagatgttaccacgggctccagaatcagacatcatgaagattgggtttttcgcttccaatgattccatcagtttcaattggatctcatctttcgcggcattccagacaccgattacgcgttcataacgttcatcatcagtgatcaaaccacgacggaattgtttcgtgatcgtttcaacttgtttgtgggcattttcgatgatgtcatgtttttcatgcaagttcatgatatctgcaatacctacagtgataccggccattgtagaatggctataccctaagtctttcatgcggtcaagcatccgtgatgtttcagtgatgcggaaacgtttgaagacttcagaaataatatttcctaagtttttcttcttgaatggtccgactagttcttgttctttgatgaaagcaggaatatctgttccagcttcgacaaagtacttatctggtgtttggactgtcaagttgaaatctgttggttcattcaagtaagggaattctgttggcatgatcgagttgaagatcactttcccaacagtcgttaccatcaagcgttctttttgttctgcagtaaatggtttgtcccctaatgtgtttggattgatcgcaatacgggtgtgtaaatgcacgtaaccattgcgccaagctgttactgcttcgtccatgtcgcggaagatcatgccttccccttcgcggccttcttcttccatcgtcaagtagtagttccctaggaccatatcttgagatggtgttacaactggcttaccgtctttcggattcaagatgttttgtgctgctaacatcaacatccgtgcttcggcttgcgcttcttcattcaatggcacgtggacagccatttggtctccatcgaaatcggcgttgtaggcttcacagactagtgggtgcaaacgaatcgcacggccttcaaccaatacaggttcaaatgcttgaattccaagtctgtgcaacgtaggtgcccggttcaaaagaacagggtgttctttgatgacgtcttctaggacatcccaaacttcatcttcttggcgttcgattttacgtttcgcatttttgatgtttgacgcgatttcacgagaaaccaattcacgcatcacaaatggtttgaacaattcgatcgccatttcttttggcaatccacattgatacatttttaggaatggaccaacgacgataacggaacgaccagaatagtcaacacgtttacctagcaagttttgacggaaacgaccttgtttccctttcaacatatgagaaagagatttcaatggacggttacctggtcctgcaactggacgaccgcgacgaccattatcgatcaaggcatccactgcttcttggagcatccgtttttcattttgaacaataatattcggtgcatttaagtctaatagacgtttcaagcggttgttccggttgattacacggcgataaagatcgttcaagtcacttgttgcgaaacggccaccttctaattggaccattgggcgcaaatcaggcgggataactggaataacatccatgaccatccagcttggtttgtttcctgaagcacggaaagcttctaagatatccaaacgacggatcgcacgtgtccgtttttgtccggtcgcatttttcaattcttcttttagttcggccacttcgccgtctagatccacaccatccaacaattgtttgatggcttcagcacccatcgctgctgaaaattcttgaccgtattggtcacgtttttcacggtattcccgttcagtcaataattgtttcttctcaagactagtgtttcctggctcgatcacgacataagaagcaaaataaatgatttcttccaaggcacgtgggctcatgtctaacactagacccatccgtgaaggaatgcctttgaagtaccaaatatgtgatacaggtgccgctaattcaatgtgacccatccgttcacgacgaacttttgagcgagtgacttcaacaccgcaacggtcacaaacgattcctttataacgaattcgtttgtattttccgcaggcacattcccagtctttggttgggccgaaaatacgctcgtcaaacaacccttcgcgttcaggtttcaacgtacgatagttaatggtttcaggtttttttacttcaccgtaagaccagcttctgattttttcaggagaagccaaaccgatttgcatactttcgaatttatttacatcgatcaaaaaaggttccctccatttcatttcatggacatatccgatagaacacgaggttgagacctccgtctgattttgacgggtgtcccctcgtttctattattgcaagcgatcttctgctgtctcgatttgttggttcaaatcatcggcggcatttttagcttctgtttgtgcttgttgctcaatttcacgagcattttgttgttcggcaaattttgttaaggcgtccacggtgatcaagtcatcatcgtcatcatccatatcacgcaattcaatctctgcatcatcaatgtctaagacacgcatgtctaaaccaagtgattgcaattctttgactaatacgcggaatgattctggtacgcctggttttggaattggttcccctttaacgatcgcttcgtatgtcttcacacgaccaacaacgtcatctgacttgtacgtcaagatctcttgcaaggtataagcagcaccgtatgcttccagtgcccaaacttccatttccccgaaacgttgtccaccaaattgtgctttaccacccaatggttgttgcgtaaccaatgagtatggtccaattgagcgggcatgtaatttatcatcgaccatgtgagccaatttgatcatatacatgacacctacggagattcgaccatcaaatggttctccagtacggccatcatacaaaacggttttggcgtcgctagccatgccggcttctgcaactgttgcccagacatcttcatcgctggcaccatcaaagactggtgtagcaacgtggattcctaattggcgggcagccattcctaagtgtaattccaatacttgtccaatgttcatccgtgaaggcacccctaatgggttcaacatgatatcaactggtgtaccgtctggtaagaaaggcatgtcttcttctggcataatgcgagaaacgacccctttgtttccgtgacggccggccattttatccccttcatggattttccgtttttgaacgatatacacgcgaacgagcatattgacacctggtgacaattcatcgccagcttcgcgggtaaagattttcacatcatggacgattccaccaccaccgtgaggtacgcgcagagaagtatcgcggacttcgcgggctttttcaccaaagattgcatgaagcaagcgttcttctgcagatagttccgttacccctttaggcgttactttaccaaccaacagatcgccatctttgacttccgcaccaatgcggatgatacccatttcgtctagatctttcaatgcgtcttccccgacattcgggatttcacgagtgatttcttcaggtcctaattttgtatcacgagcttctgattcatattcttcaatatgcacagaagtgtagacatcatctttcaccaaacggcggctcatgatgatggcatcttcatagttgtacccttcccaagtcatgaatgcgactagaacgttttgtcctaatgccatttcaccattttccatggatgggccatctgcaaggatgtcgcctttttctactttttcgccaagggctacaagtgggcgttggttgtaacttgttcctgagttagaacgacggaatttcgttaccgaataaacatctaatgcgccattgtcgcgacgaacgcgaatttcagcagcatccacatattcgacgattccatcttgtttacacaataatgcagcacctgagtcatgggctgatttgtattccataccagtaccaacccatggtgatttagggttgatcaatggaactgcttgccgctgcatgttggcacccatcaaggcacggttggagtcatcgttttccaagaatgggatacaagctgttgcgactgcgactacttgtttaggtgaaacgtccatgtagtccactttgtcgatcgacacttctaagttttcagaagtcgcacgagccataacaacatcattcacgaatgtaccgtcttcattcagcaaactgtttgcttgggcaacgacgtaatggtcttcgatatctgcagtcagatagtcgatttgatctgtcacacggccagtctcccgatcaacacgacgataaggggtttcgataaagccatatttattgactttggcataagacgccaagctattgatcaacccgatgttcggtccttcaggcgtttcgatcggacacatccggccatagtgggaatagtgaacgtcccgtacttcatatccagcacggtcacgcgtcaaaccaccaggtcctaaggctgataaacgacgtttatgggtcaactcacccaatgggttggtctggtccatgaactgtgacaactgagaagaaccaaagaattctttgatacttgctacaacaggacgaatattgatcaattgttgcggtgtcaatgtttctgtgtcttggattgacatccgttcacgaacgacacgttccatccgagcaagtccgattcggaattgattttgcaataattccccaactgaacgaatgcggcggtttcctaagtggtcgatatcatcaacattgccgataccttccattaaattgaagaagtagctcatagaagcaatgatatccgctggacgtactgtacgaacggtcgtatctggatagccattaccgataacattcacttcttgttctggatcttttggtgaaaagactttgatgacttgaacagtcattggttctgtaacaacaccgtcttctgatgggtagtaagtaacactatttaaaccattatcgataaaggcacctaatgtttccatcacttggtgagtcaacacagttcctttttcgacgatgatttcgccagtttcaggatcaaccaatgtttctgctaatgtcaaattcaatagacgtgttttcaagtctaattttttgtttactttgtaacgaccaacatttgctaagtcatagcgttttggatcgaagaagcgagcattcaacaagctgcgtgagctgtcagccgttttgggttcgcctggacgcagacgttcgtaaacatctttcagtccttcttctgtccgagagtcgcttgcatttttgtgcaagtctttttcgattgtgttgcgtaacgaatcactgtctccaaaaatttcaaagatcgtgtcatctgaaccaaaccctaaggcacgcactaacacagtcaaaggaatcttccgagtacggtcaatacgtacataagagatgtctttcgcatctgtctccatttctaaccacgcaccgcggttagggatcacagttgagccgaatccttcttttccgttcttatcgactttcccatggaaataaacacctggtgaacggactaactgagaaacgatgacccgctctgccccattgatgataaacgtaccttgttccgtcattaatggaaaatcgccaaagaagacttcttgtgacttgatttcgccagtttcacggtttgttaaacgcaatgtgacatgcaaaggtgccgaatagttggcatcatgtgcacgagcttcttccactgtatacttaggttctttcaattcatagtctacaaattctagggacaaattgccgttaaatccttcgattggcaaaatatcttcaaacatttctcttaggccctcatctaagaaccattggtaagagtcggtttgaatttcaatcaaattcggtaattctaatacttcactgatccgtgcgaaacttctacgttcgcggtgctttccgtattttactacgtgtccagccaagctcttcacctcttcataaagtctttcaaaaaggctatccgattatttacaaaactgtaacaaatattaaatatatattacagaaagcattttttgcggcttttaggcaaaaaaaaaccaaaaatagaacagatgcaatgggcattttctacttttgtttccttattcccaagccgaaacggacaatatttcgtttctgcttttttctttcagatagtttttgcaactccttattatacagatgaagcacattgatgtcaagctttcattgaaagttgcaacgcttttccgatacatgcaaattctaagttttctttaagaaaggattctctaaaattagaaaaaatgacgagaaatttctttgcattttcttgttttcttgctatgctagcaaaaaaagcatgagcgttacacgtgaaacattttgaaaggagcaactatgacaactagagaaaagattttggcattgttgcaacaagaaacctccgttttatccggagaaaaaattgcccaaaaattggacatatcacggactgccgtctggaaagcgattaaagaattagagaaaaaaggctaccgctttgaacattcagccagcggctatcgctatttatcagcagatcgttacgaacaacgcacgttacaggaagcactgccgatggtagcaacgatccagatcgctgaccaagttgagaccacgatgaaagaagcaaagctagctgctttatctgaacttgcgactccggctctatttttagcagaaacacaggtaggcgggcatggtcgattcaatcgtcctttcttttcacccaaaggaaaaggaatctatatgagcttattgctgaagccaaatcataccttcagcgagttgcctcaatacacattattggcagcggtagctgtggcacaagcaatcgacgagttgaccggcaaagaaacacaaatcaagtgggtcaacgatatttacttagaaggaaaaaaagtctgcggtattttatctgaagccactagtgactttgaaagtggccgcatcgcttcgatcgtcatcggcataggcatcaactttgcgatccctcagacagctttcccagaagatatccagcaaagggcaacctctctctttccaactggggaagctcctgtcaatcgtgcgcgcttgatcgcagcagtatggacacgcttctttgacttgttggatcaattaccggctgatgattatctaactatttatcgtcagaaatcatttgttcttggtaaaaccgtttgcttcacacaacaaggcatccgctatgaaggagtcgcagagtccatcactgctactggtgaattagtggttcggacaacagatgatgtcaaagtcctttcttctggtgaaatcagtctggagaaatattcttagcagcatttttttcaaaaaaccaaacaaagacccgtcagatcaagaaagactgctcttacgatgcagccattctgtgtctgacgggtctttgtcttgctatttagtgaacgagcatttgccagatcaggcataaaattaggcctagagcatagctactgttaaataaaatcatgtttttgattgaataaccaaagcttcttgggtgcggcaaacttgcttgatgctctttcaagttttggcgaatcttcggtaaggttagaaagacgagtaagatcggccactgataaagaccaaacaaaaatccgatcaaaatcgcaccgtaggatgccagcatcaatccttggaaaagatgaatgccgttggtccgaccaatgtaataaaccaatgtgtaccggtggttctcaatatctgtttctaaatcacgcaagttatttgccaacataatattggcaatcgtaaatacaaggggcaaggatgctaatacaatggcacataccgcccacagatgacccactaatccgaaggttccggtcgcaaaatcaatgtctaaataaaaaactttttgtgtgacagtgttcagatagatggtgatggcaaaaatacctaatcccatcgtcactccactaaagacttcccccaatggcatccgagataagggaaccggcccaaaggtataaaacaccccgataaagcatacgactaatcccatcagcaataaaagccagcctgtcatccaagtcagataaagaccgatcaacaacgtcagcgccaacatgccaaaaatcatgttccgtacaagggtttcgggaatcttttcccgaccgatcacattttgttcatacttataaaccttagactttgcttttttgaaatccatgtagttattgatcgatgttgtcgttaaatcaaacaagatcatccctacaaaaaatataatggtgttcaatggatggaattcatggaagtatacgagagaaaacaagattcccataataaacggaaaaatacttgcaaccttagtccgaatctcaacaacttctaaaaatactgcaagagacacaagatccctcctcttattttaaatcggcacgatcgcccatcgtgtaacctgattcttcagacagcttaaaggtatctttgattccatccgtaacatagacgatcccttctttcgtgatgaagatcgcatctgttcctttgtcggtgtgctgctcgatatattctaaaccagctttgatccctttatcaaaaaccaccgtcgtcaaaccatcgccatcgatcgatttatctgtgatcacagatacactggcaatgtcattgtcatacggataccctgtttctgaatcaaagatatggtgataggttttgccgtcgactttcaaatagcgttcatagattcctgaagtgaccaccgttttgttggtttctttgatactgccaataatggaaccgcgggcttcgttgggatcttggatccccacattccaaggttcgtcttcaccacgattgctatgtcctaacacatagacattgccgcctaagtcaacgattgccgaggtaaccccttgttccttcaatactttgactacttcatccgtgatatatcctttagcgatcgctcctaagtcaatgatcatatctttgtcttttaaatagacggtcttctcatcatcattgaactcaactttccgataatcgatatgttttagtgcttcatcaatttccgattgttccggtttgcgagcatcatcaaatccaatccgccacaattgggtgatcgcaccgatagccatattgaacccgccattagattttttgctatagtcataggcatccttcaatagaaaataaatatcatcagaaactttgactggtttgattccagcttgggcattgatctcgtcaacttctgatcctgcttggttgatcgtaatcttgtctcccaattctttgatgcgggcaaacgctggtttcatcgcagattctttgccttcatcgtaaattctgatgcgtgtatacgtgcctaataaaaattcttcttgaaaatatggttcgtctcttaattgaacagtttctttttcactgccgcaagcggataatattgtgataaaaaaaacaatcaatgcaaaaaacggtaatttctttttcatggtcttcctcttttctgttgtattcaattttattataatagctttttttttctaaaatgaaaagggttggcgccagaatcttagtttcttttgcgattctttaatctcttctgtttctttatcagacagagggagtccacgtaggaaggttttctactagaatttttttattattggtaggttatttagcgcttttgaacgtaaaaaaagcggtactctacatcagaataccgcttgttcatttatgaattattcagtgacgatgttatccacttggataggtgtttcgtcccctttttctgctgcgttcaacaattgttgtgcatagatcacgaagctgtggaagctgtgtgtcgcaccagaaacaacatccatatcagcaactgaaccatcttcagcatttactgctgtcacgaatgcttcgttgaagtttggaataaattcttctgggtttgtaccagattttgctttcatgttttcgttgtattccgcatcatcttttttagatttgccatcttcgttaacatagtcatagttagattcagacactttgccgtctttgacagtgattgagaatgctacacggtagccatttgaatagttcttttcttctaagctatacgtaccatctttcaagtctgcaccgttgtcgatctcgattgtatctgtgttgcctgcttgagcagcttggatcaattgttgtgcatagttttggaatgaatcgaatgagtgtgtcgcaccagaaacaacttcaattgctgaagggctttgtgccgcaaccaattcttcattgaatttaggaataaattcttctggactgattcctgctttggctttcatgttttcgttgtattccgcattttttgtttttgattcgccgtctgcattgatgttgtcatatttagattcagtgattttgccatctttaacagtgatttcaaaaactacgcggtaatcgtttgaataatttttttcttctaatttatatgtgccatcttgcaatggtgctcctgcgactactttcgcttctgattcagaagttgctgttgctgattcgctgctagcgacttgtgaagtactttcttttgttgacgaagaagctgacgtgttgttgtcagatccacaacctgctaatactaacgctgagaatgaaaataccgccatacctaccattaatttctttgctttcataatgctccaccttttactaattattttcccacaaaaaaagtttgtgattcatctaacattttaaagtaaattagaaatatgtcaaccgcttccctatggcttttgtgaatatttttgaactttttttgattttcgcaaattttcacgaatttcatgaaatatcgtattttcctatcagaagagttagacaaacgatggatttctatatataataggaacgattgtgtatttattatcatagattattttttttaaggagagatttgcaatggcaaagaaaagcattgtcgttgtcggtgcagggtatgccggtgtttcagcaaccaagtacatggcaaaaaaattgaaaaaagacaatgatgtagaaataacattgatcgatcgtcactcttatcacaccatgatgaccgaactgcacgaggttgccgggggacgtgtcgagccgaccgcaatccaatatgacttgcaacgtttgttttcacgtaagaaaaatgttcgcttagtaaccgacacggtaactgctatcgataaagaaaagaaagtcgtacaaacaaaacaaggcagctattcctttgattacttgatcttaggtatgggtggcgaaccaaatgacttcggcactccaggagtaaaagaacacggatttactctatggtcatttgaagattctgttcgcattcgtgaacacatcgaaaaaactgttgctaaagcagcaatcgagcctgatgcagcacttcgtaaagcaatgttgactttcgttgtctgcggttctggctttaccggtattgaaatgatcggtgaactgatcgactggaaagagcgtttggctgaagactacaaattggatccaagcgaaatcactttgaaagtggtcgaagcaatgcctacgatccttaacatgttggatcgtaacgatgctgccaaagcagaacgctacttgaaacaaaaaaatgtcgaattagttctgaacgcaccaatcgttgaagtggctgaagatcacatcaaattaaaagatggttcaacgatcccaacttatacactgatttggacagctggtgtgaaaggaacgagcgacgctgcagactttggtctagaaactgctcgcggtttccgccttgttgctaacgaatatatggaagcaaaaggttatgaagacaaaaatatctatatcattggtgacttggtcttctatgaagaatttccaaatacaccaacaccacaaatcgttcaagccgctgaacaaactggtcatacagctgcatcaaatatcgtcgcagcgatcaaaggtggcgaaaaacacaaatttaaaggaaattaccaaggattcatggtatcgattggcgctaaatggggcgtagccaacttattcaataagattcaccttagcggtttcttagcaatcattatgaaacatatcgtcaacttgaaatacttctttgacattcgttctggctactacatgttccaatacttgatgcatgaaatcttccatatcaaagatgatcggacagtggcgcgtggtcatacttcacgttacggaaacgttctttggagtgttccactgcgaatcttctacggtctagtatggttcgttgaagccttcaagaaaattctaggtacaaatggtgaagtctttaagccaggaacatggtttggcgaaggttcttggttccaaggaaacagcgtattcccttggacttgggaatatcaaactgttgctgatgcagcaagcggcgcgagtgaagcagctgacgctgccagtgcggcaagcggtgcaggcgatgctgccggcgcagcagcaacccaagcagctcactttggtttaagttatgcctacggcgaacaaccaatggtcgtgatcgaaaaatcaccagattggtttacaaaagtgatgcaatttattatgcctaacaacgatgtagcaatgttcttccaaaaattcatggtcttctttgaaattgctttagctttagcattgatggctggtttgtttacttggttagtgaatgcaacgacaatcgttttagtcttgacattctgtatgtcaggtatgttctattgggttaacatttggttcatcccagtagcctttgcattaatgaacggttctggccgtgccgttggtttggatcgttgggtgatcccatggttacaacgtacacttggtaaatggtggtacggtacaccgcgttccttatacggtaaaaaataatcgctttttaaacgagactgaggcagcctgatcctttgatcaatgtctcagtctctttccaagttaagcacttttttatctactagaaaaaccttctcttaaaagtagtagaaaaccagcggattatgctagaatgagacacagaacttcaaaggagtctttctgatgaaagtaaaagaatttatccgtcgtgcccacctgaagccttgggacggggtcatcattctggtactgatacttagctcgtttttaccaattttgatttttgggcaatcacaaagtacccctactgccgccaaacaagctgttttgcgagttgatggcaaggagatcaaagagtttgatttgattgaaggacaagatagctacacgtatcgatacgaagatccagatggtgattacaatctcattgaaatcgctggtgaccgcatccgcatcaaagaagctgactgtggcgatcaaatttgcgtccgccgcggctgggcctcaaaaaatggcgaaacaatcgtatgtttgccacataaattagtgatcgaagttcgtgcaacagatgggagtgagacagacgatctaatctactgatcgtgatactatgagtcgtttacagaaaatcattttcatctcattattagttgctcaaggagtcgttatcggtttgattgaaaatatgattccgtatccttttgcctttgctcccggagctaaattaggtttagccaatctgatcacgatcattgctttgttcactatgcctaaacgagacagttttttgctgatatggctacgtttgatcttaactacactcttaggcggaactgtttcaacattcttatatagtatgagtggttcacttttgagctatttcggtatgttgctagtaaaacaactaggacctaagcgcgtcagcattatcgggatcagtgcagctggtggttttttacacaatgttggccaattggtcacagcttcttggattgctcaatcctggagtgtcatgctttacctacccgttctcgcatttttcggtattctatcagggatcgccatcggcatcgccgccaactatcttttgcaaagagtagacacattacggcgatttcagcttgattatgaacggcaaaccaatgtcaagtggcgttctgattcaaaataaaggagtcatttatgaaacttcatccaatgtggcaagcatatcctgcgttgcaaaacgatttatctgaatcgctgcaattaatggaacaatccttgaaactaaaaaataaagcagtagaacaagcgatattagcgatgatccattctggcggcaagatgctccgcccggcctatcagttgttgttctctgaattcggagaagagaaagattctcaaaaagcagtagcactatccgcagcgatcgaaatgctccatactgcttcactgattcatgatgatattgttgatcaagccgatactcggcgaagcttgcctactatccgtgcacaattcggtaatgatgtcgccgtttacgcgggtgattatctctttgtatgctgttttaaactaatggcggattacgctggttctctcaaaagtctgcaaatcaattctcgcagcatggaaacaattttagctggagaattaggacaaatgagcaaacgctacgacctgaatgtgacgattgaggactatctggaaaacatttccggtaaaacagctgaactgtttgctctaagctgctttatcggggcttatgaaagtggggcttctctacgtttagccaatcaggcaaaaacgattggtcaatccatcgggttagcatttcaaatcatggacgatatccttgattacagccaaagcgaaagtgccttgggtaagcctgtccttgaagatgtcaagcagggggtctactcactgccgttgttgttggcactgaaaaaagagcgggcagtgctaacaccattactggagaaaaaagccgagatgaccgatcaggaagcgcagcaagtctaccaaatcgttcacgacagccatagcgttgaagaagcacatcaattagctgctcgttatacaaaaaaagccctgcaaggaatcaagaaattacctgatcctggaaaaaataccaaagactatttgtatcagatcacaaaccaaatcctagctcgcacaaattgagtggtttttctataaataatagtttgataagtgatttagaggtagctgctttcaactagctgtctttcagacaaaaaagaacgatctccgattgattagacgacacgtcttctataatcggagatcgttctttttctttacttcactttctcttgactgtttatcgcattgtaacgaactcttctgctccagtcggatggattgcaacggtattgtcgaaatctgccttagttgctcccattttgatggcgacggcgaatccttgcagcatttcgtcaacaccaattccaataccgtgtagaccaatgatcttctcttcttttcctaaacaaacaagtttcatttcacatttttgacgatagtcattcaatgcaaagtacattggtgtaaagcgtgaacgatatactttgatttcttcttcgccatattttgcgattgcagcttcttctgaaagaccgatcgttgcaattggtgggtgcgtaaaaatgactgtcggcaccaaatcataatctaaatgtgcctcagtttgaccattgaacaatcgttcagacaagcgacgacccgctgcaatcgctactggcgtcaactctaatttgccgatcacatctccaactgcaaagatcgattcagcagtcgtattttggtacttatcaacaatgacaaagcctttttcatctagagagacatctgtattttccaaaccaaggtgttgggtattgggcactcgtcccccagcaaacaacacacagtcccccgtcagtgtttgaccattttcaaagaaaaccgtatattgtccatcacgttcttcgatcctttcagctacatagccggaataaaggtccattcctgcttctcgataaatttctactaaattgtcagttaacatatgatcaaacgcccgtaatggacgttctttacgataagcccaagaaacgtgactgccaaattgctgactcattccgctaagttctgccgcaatgtatcctgctcctaagacgatcatttctttaggcacttcttttaaggcaaaaaagccattggaatcaatcgcatgttcaccaccaggaatcgacatgacactaggttttcctcctgtagcaattaagatctttggcgctctgtattcttgtccatcgaccgtcacagtatggttatccacaaactgtgcataaccgtggataacttctactctgttgctatctaagcctttttgatatgctgtgtgtaaaaaatcaatatatttttcacggttatccacaagttgcttgaaatcaaatttatccacatgtggataaataccatagctcgtggcatcacgcttaatcatttctaacatttcacttgcttgccacatcacttttttgggtacacagcccacattgacacaagtaccccccagctcattgccttcaatcaataaaactttagctccatgcattcctgcacggttagcagaagcaatcccgccactgccaccgccaatcactatgtaatcatactcttgcattattggtctcctccttaggaacaacttcattttggtgtatatcgaaggatttttcaaatcttacaaaaaaatgcgacagaaagcaccgagtcaatgataaagggagaggaacataacatgtacgaaattcaaactcgcttttagcacagtgcgctacccctcgaatctcattatttttcctttatcagccttggatacttctgtcacagtttttattttttcttccggatcatgtcgccaacctgaacaggttcagcgacgggcatcgttagaagcatcatcggatttggtgcgcgatcgatcgattcaccgtcttcattatacatgacttccaccttttgatggaaatgatggaatccaggtccataaaactcgatctcgtcccccaccgaaaacaaattccgctgccggatcgtggccatctttgttgcgtcatcataggccatgacttccccgataaacttgtattgcgggattttacgccgaggaccaaataattgctcattttcactcggtgtatggtaataaaatccggtagctagttctctttgcgctaccttccataattcatcaatccactcttgtttgcagacatagttctctggatcttccatataactgtcaactgccgctttgtacacattcgcaacagttgaaacatagtggatcgatttcatccgtccttcgatcttaaaactatcgacgccgttttcaatcaagtcaggaatatgttcgatcatggacatgtcgactgcactcattgagaattcttcttcgatcgttccattctttgtcaaactctttctttcttgtgcaaaaggcatatcaaaaagatcatatttccaacgacaagattgtgagcaaccaccacgattggcatctcgcatcgacatgtgattggacaatgtacaacgtccagaataagagatacacatcgccccatgaataaaagcttcaatctccacactcgtatttttgcggatttcggcgacttcttccatggatacttctcgagccaagacaactcgctcaagcccttcttctcgccaaaattctagcgtttcataatttgtcgcggaagcttgcgttgaaagatggatcggcaatcctggtgcttctgtcgcacagatctcgatcaaagcaggatcagacacgatcaccgccgaaattcccacatcccgcaattgacggaaaaattccccagctccttcttgattgccttcatgggtgaccatatttgctgctacatatactttagcattatgagctttagcaaatgcaaccccttcagccatctcttcataggtaaagtttccggcacgacttcgtaagccataggcgttgccgcctatataaacagcatccgccccgtaatgaatggctgtttttaatttttctaatgtaccggctggtgccaatacttctggccgtttcaatttttgtttgactgtcatttccattgctccttacttgatatcctctggattgatcgcataaaaaccggtatctaacccccgttgagctggatgtagctgacgtacttgttcactcaagctagctgcttgttcagcagtccatgtgccttcagtaagcaattgcttcgcctgtgcaaaacaagctacgatcgagacaaacgctgtccctggagtaaataaaccgtctaacttccaagtctggtaccccgtttcaaaaagagactgcaattcattcatcaaattgatgtcattattggcgaaaatatgcgtgccatgactgtcttcataaatcgagtagtgggtatcctccttcttgggttctgataaaaataaacctcgctcacgagatttttcatcttcctgttgcgtataattataataattttgaagcaatggacgtttcgactgatggatgcacgttgccccatagacaagcacttccgcaggaatcgttagctgtggtgctaaaactgtcatttctccaaaggggacttctcttgctaaaactgctccaatcgcccctttttgcccccaaaaattgatttgtctagcactggtgaccagcgtctctccatcgtatacaaacggcaatgccaattccggattctttttcatacgataaatgattcctggatcgccgatagaaattttatcaacatggttggccttcaaaaaagccaagtattctggaactagcgtcattttttgcgggtgcatgatgccattgactgccgccatcgcttgttttccttctgcttgcgctaagcggatcaattcgctttgttcctctcgtgagaaagatgtcggcaaacgcaaaccgaaagtttcttctccgaaaaaaatagtatctacataaggtaagagctgttttgcttgttcaatcgactccaccgttgcgataatctcaaccatgatattcctcctctataactcactaatagtatcacaggcaacacggctttccaagacttccttttgaacttttttcactaaaaaaaggaatactcagcgatgagaactggtaatccaactttaacgctcttttaaatttgtgaactttatgagtttttatctccatttcaattgttcgaaatccaacaaatactatttgcccacaaaaaaactatccaagcagcaaacgatggttcagcctgcattctgctgaccatcagtcgtttgctagttagatagtttcatttttctttctaatagagcttatacttgttgaagaatacgagattggccttctcttacattcaatgtaattgagcctttcgatgccccaatcgtcacccggtcacctaaatggatctgtccagacaatagtgcttcgcttaagcggtcttcgacctctttttgcaatgctcgacgaattgggcgagccccatattctggatcaaaaccagctttaccgatgacatcaatcgctgcagatgtgatcttcagttgaatgtcttgatcactgagacgtttgatgatcgctttactcatgattttaacgatttcatgaatttcatcttcgcctaatgaacggaagacaactgtttcatccacccgattcaagaactcaggacggaatgctttcttgagttcttccagaatccgtttttgcatcgcttgatggtctttgctaagatccaccacattgaaacctacattcttttcttcacgaatctgttgtgcgccgatatttgaggtcataatcaggattgtattacggaaatcgactttccgccctttggcatctgtcaaatgaccatcatcaaggacttgtaagagaatattgaagacatctggatgagctttttccacttcatctagtaaaatcactgaataaggttttgaacgaatcttttcagttaattgtccaccctcatcgtaaccaacataaccaggaggggagccaatcaaacgacttgtactgtatttctccataaactcagacatatccacacgaacgagtgaatcctcactgccaaacattgcttctgccaaggcttttgccagctctgtttttccgacacccgtaggacctaggaacatgaatgaaccaattggacgattcggatcttttagaccactacgtgctcgacgaatcgaacgtgcgactgctttcacagcttcttcttgaccaacaactcgctgatgcaggattttttctagatcgagaagccgttcactttcttttttctccatttgctgtaaaggaacgcccgtccattgcgacacgactgccgcaacatcttcgcctgtgacactgtctgcgtagccagaagcttctttcacttccatgaacgcaacttcagtcaactgctgggtcaatttcttctctttgatgcgcaaacgagctgcggcttcaaaatcttgttggcgaatcgctgcttctttttcttcaatcagattggcgatttcattttgcaaatcggccaactcagaactttcgtctgttttatccaagcgcacttttgctgccgattcgtccattaagtcaatggctttgtccggcaactgccgtgaattgatatagcgtaccgacaattggacagcggcatgcagggcatcatctgaaatctctacgccgtgatgctcttcataacggggacgtaatcctcgtaaaatttcttctgcttcttctggcgttggctcatccacttgaacacgggcaaaccgtctttccaatgcagaatctttttcgatatacttttgatattcatctaaggtcgtagcaccaattgtttgtaattctccgcgggctaatgcaggttttaatatattcgatgcatcgatagcaccttccgcaccaccagcaccaatcagtgtatgcagctcatcaataaataaaatgatctgtccatcttggtaaatttcgtcgatgattttcttcattcgatcttcaaactcaccgcgatatttcgtgccagctactaaagcacccatatctaacatcattaagcgtttgttctgcatatcttctggtacttcaccgtgaatgattttttgtgccaatccttcagcaatagctgttttaccaacccccggttcccctactaaaacagggttgtttttggtccggcggcttaggatttgaatcaatcgtttcacttcttttgctcgacccactactggatctaagcgtttatctcttgccaattttgttaaatctcgagctagtgagtccagcgtcggcgttccttgtgcttttccttgaggacgacgacgacccgcaccaccggcattttttgtgtcattgatacccatttttttctttaataactgccgcattttagccaaactcaaacctaagttcaacatgattcttgaggctaaaatatcttcatcccgaagcaatcctaacaaaagatgctctgtgccgatttgaagagcgcctaaacgcttagcttcatctccagcgtaaacaaatgtttgcttcgctcgtggggaataggctagataggcattctctggatattggcgaacagttccgtaacctgttaaatgctcgatttcttcgcgaatatcattttcagtgatattcatttcccgtaacgttttgccggcaatgccattttgttcaatgactaaggcaagcaagatgtgttctgaacctacggactgatgtttaaagtactttgcttcttcctgtgcgatcgtcagcacagctttcgctcgttgtgtaaatagttcatccatctcattcacttcctgtcttcataacttaaacgttctaaaattgcatggagcaagtctgctcgtgttcgattttcataaggagaacgtcctaatactgacttcgcaatgacggtcaacaataaattgccctcacgcttcgacaggattccttcctcataaagtttttggattattgcataagcatctttttccgagatggtttcatcaaataattgattcatttcttcaaggtagtggtggttatccgtgatctttactttttcgatacggatatatcctccgcctccacgtttgctttcaacagtataccctctttgaatagtgaaacgggtattgatcacataatttatttgtgaaggcacacaattgaataaattcgccatttcagctcggcgaatctcgattgtttcgctgtcttcaagaattttcttcaaatatgcctcaatcaaatcggaagtgttatgatgattcaattcattccctcccttgactaattctgaccttcattatacccaatttttgaaaacttgaaaagatgtacgcctagagatgcggaattactaaaagaaacttaaacagctagctcttttttcgcatcacaaaaaaactatccgcatcttcaagtggttacttctacagtctttggttgccatctcactgcgacctatagagtaaacttaaaaatcattcggatagttttttcagctattgattaatcttcagagctcgttgaactcgtacttgttgattcactgctagcggaggattcactcgtagaggactctggttttggtcctttagaaatagtaacatttactgaagaaccaacagccaccgaagtcccttcacctggcgaaacatctgtgacttctccagccggaacagaatcattgtagcccgattcttctttgatcgaatattttaacccagcctcatttagtgctgctacagcatcatttcgactctgtccaatgattcgtggcacattaaccatctcttgaccgctgctgactgtcagcgtgataacagtttgagaggtaatgactgattctcctgctcctggcgcttgattaatgacagtccccaccggttcatcgcttggcgctgattgttcataaatattttcggttggaactccttttgaggtcaatgccgcccgtacatcttcgattctttgaccataatagtcttccattgcaaacgattcaggtcccgtgctgactacaaaagtaatgtcatcctctttcggagaaactttctcgccgacatctggtgattggctaatgatcagaccttctccgatagcatcactggatttggtctcttctttgatttggtcttctgaaaaacctaacttgatcaactcggcttttacatcttcaaaatttttctcttcatagttttttaaggtgattttttcagtccctgagctgatatacaaagtgatctcgctattttttttgacttcggttccttcttgtggatccgttttaacgacattgccttcttcaatctcatcgtcagcaatttcttcggtttcatcagcaacttttaatcctgctgcttccagcttttctcgagcaacggtctctgtgtctccgctgactttagggatctcaacatcgccgcgccctccgccaaaaacaaaatagccgccaatgaccagcagcgctgcaataactagtattggcaggatcagccaccatttcttccgcttcttctttggtttttcttgtttctggtctgcggtctcttctacttctggctccgtcactgccggttctgcaggctgttcagctatcatttcatcggtaataggggtcagcgctcgagtttcatcgtttagcgcatgtggctcccaccttggttcattcaagcgctcaggtgacagggctgttgaaagatcttctcgcatttcatcagcggtcttataacgatcggcttgctctttcgctgttgcctttaatacgacattctctaatgattgaggaacatttttatcatagatacgaatagaagggatctcatcttgaaaatgttttaaggcaattgtgacagcggactcaccatcaaaaggaactttccccgtcagcatttcatataggatgattccaatcgcatagatatcagattggttagtagccatacttccccgtgcttgctctggcgataagtagtgcacagagcctaacatcgagttggtttgggtgatcgatgtttccgataaagcaatcgcgatcccgaaatccgtgatcttaacgacgccttcttcattgatcagaatgttttgtggtttcaagtcccgatgaatgattcgatgttggtgagccaatgccactgctgacaaaatttgttgcacgatatcgacaatctgtagataaggaactgggtaatgggtttgaatatatcgcttcaagtccatgcctttgacatattccatcaccaaaaactgcatcccatcttcttcgcctacatcatacactgttacgatattgggatgaaccaactctgtggcagccaatgcttcacgctgaaagcggcgaatcgcatttttatcattttggaagtcaaatcgcaatactttgacggcaacttctcgatcaagaatcaaatcatgagccagaaatacatttgccatgccgccactgccgatattgccaatgattttatagcggccatttaactttttccctatttcaatcatgggcagttcctccaactttgatcagtaacactgtgatattatcgactccgccttgttgattggctgcatcgatcaactgctgaaccgcttctttaagggacgacgcgccttcaatgatggctgcgatcttttcatctgccaacatgtttgtcagtccgtctgagcaaagaagcaagtaatcactttcagcaaaataatgaatcgctacatctacttctactgtattaggcattccaacagaacgagtcaaaacatttttgcgtggatggttcagtgccatttcagcagtaatttggccagatttcaccaattcattgacaagagaatggtcttcagtaatttgtatcaactcatgatcccgcaaaatataggcgcggctgtcgccaacattcgcaatcgtaaattgatcctcaaagagtgctacagcaatgatcgttgttcccatgccattcagcgcctcatcctcgatgcctttttcatagatcgagacactttctgcctggattttttggatcagccattgagcagccttttcactatctgtcaattctgttttttcccaagcggttcccaagccactcacagcctgacgactcgctacatcacctgcccgatgtcctcccatcccatcagctaagatcgccaatgtgatactttttttgttgacatacacagcagcaaagtcttggttcgtattccgacgtttaccaacatctgtttgaaaatggatttccaacttcttttcacctcattactttttgcgaaggcagcttatgaaaaagccatctgtcataaaatcttgcggataaatcgttagcatctgatcattgatattcgcagcaatatcagcatttaccgatacatcgattcgttcgaattctggatgatccgctaagaatgcctccactactgcctgattttcttctagcattatagtgcatgtactgtagatcattatacccgaattttttagcgttggggcggcactttctaaaatcgctaactgaatttcgggtaaacgctctagatcagctgcctgcttgttgtatttgatgtctggtttacgacgcatcaatcctagaccggagcaaggagcatccactaagattcgatcaaactgttgttcctcaaaatgttgagcgacttcccttgcatccatcacttccgcttgaaccacctctgagaccgcaagtctttcagcattttcagtgatcaatttaactttatgaggatgaatatccaatgcagtgactttcccacctgcttctgcagatagaaaggacgcgatatgggttgttttacctccaggcgctgcacaagcatccaatacttggtgctctggtgcaatgtgcagtgccggtgctactaacatcgaactttcatcttgtattgtcaataatccgtcatgatataaagaagagccggctaaaaatcctttatcagccacaatcccatacggagatagttggctttctcgagcttcgattccttcttcctgtagttgaaggatggcttcgttgcgagtaattctttgtagatcaaggcgtccactagcatggctaggtactagtaaagacagccctaactcccgggttttatcgctgccgatctgcgctacgaatctttcagttagccataatggcatactgatttctatagctaaccgctccaagggatctttgatttgatcaagtgccggcacaccctctctttgaatcgtacgcaacacgccgttaacaaattttccgattcctggatttccttttgctttcgcgatttccacggcctcatttaaaatagcatgattaggtactttgtccaagtacagcatttggtaaagagaaagacgcaataatgatctgacccatggatcgactttttttgcattcttgataaagttcgctaaataataatccaatagcagctgccgactaattgttccatagaccatttctgtcaataaacgtccatctttatcatttaaacggccttgattcatcagttctctcaataataagttcgaataggcaccgcctctttcgatacgaactaaggcctctaatgcaacaaagcgaacagtatattggatttttcctattttacgcttcatgagtaccaaccttatcacctagttgaatgtgttgcccagtgccatttagaaaagccgcaatggattgacgaccttttccagctggttgtagctcttctaaagctaaaactgtctgttgaccacaagcgatccatagcgcctttttcgttcgttgtatgatggttcctggcgcggcatctgttgtttcatcgactactgctactgaccaaatcttccaacggctcccttggtaagtcgtgaaagcaattggccacggtcgcatccctcggacctgattgtcgatctcctgtgctgtctttgtccaatcaattgcttcttgttcttgcgtaatattgggggagaatgttgcctgctcttcagcttgaggcattggtttcagttctcctgataggatcttaggtaatgttttcagcagtaattctttacccaataaacttaatttctcaaacatagtccccacatcgtcttgattagtgatcggcagtttagcttgagaaaaaatacccccagcatccatttttttaatcatttccatgatggtgacacctgtttccggttcgccttccatgatggcatagtgcactggggcaccaccccgatactttggtaataaggaggcatggacattgatcgctccaaattttggtacttgcaacagcttttccggtaaaaattggccaaaggccgcagtgactaaaatgtctggtgctaattctttgatcgtttccatttcaggtgaaccgctgattttttctggttgcaaaaccaacaattggtgcttcaatgctgcttctttgacaggcgttggcgtgattactcgttttcgacctacgggccgatccggttgggtcactaccgctgcaatttcatagccttctgccagcaatccttctaagattggtacagaaaacgcgggggttcccataaagacaactttagtcattttcgtgttcctccatatattgttctagttcagattctgggatcttatcgatcattttatcaataaataagacaccattcagatgatcaatctcatgctggatagcccgagccaagtagccaaaagcttgaacctccatttcttctccttcacggtcaaagtagcgaaccgtaatctcatctgctcgcttgaccgtaccataggtatgaggaatactcaagcacccttctacatcaacagattctcctgatgactcgatgatttctggattaatcagttcgaaacgatcctcttcatctacttcaacgattgccacttgcaggtttttaccaatctgaggggccgcaatacctacgccgtcatgcgccaccattgtttcatacatgtcttctagtagttgtaccagctcatctgtaatcatagataccggttttggttttcgacgaagctgatcgtcgggatgaataataatcggatagcgcataatatctcctttaaataaaattcaacggttcttggtcaatggaaacatagagtccttttcgctgatcgatctgactttgttccaataaccgggtcaacagttcaggcaaatgtggttcatttttgtatttaataatcagttggtagtaatagcgatttttgacacgcatgatcgcgctaggtgccggtccaagcaaaatactttgacccgataattctttttgtacttcttggtaaatggcaaacatcttttgggcagctgcctgctcttcgagatgactgcaggtaatttttaccgtgtagtaataagggggatatccgctttgatgccgaacccacatttcttgttggtaaaaagcttcatagttttgggtttgtgctagctgaatcgcatagtgttccggattaaatgtctgaatgattacttcgccggctttctccgcccggccagctcggccgcttacttgcgtcagcaattgaaatgttcgttcactagaacgaaaatctggcagattcaatgctgtgtcagcatttaagacccctaccaatgtaatatccggaaagtctaaccctttggcaatcatttgtgttcctagtaaaatgtctgctttcttttcgccaaataaagtaagtattttttcatgtgctccttttttgcgggtagtatccacatccatccgcaatacccgtgcttctggaaatctagcaattagttcttcttcaactttctgcgtacctgttccatagtaacggatcttatctgcatgacaactaggacagcggtgagggatcttttcttcatgcccgcaataatgacagcgcatcgtcttggtatccatatgaagcgtcaaagaaatatcacagttcggacaaggcagaacatacccgcaatcacgacacataacaaaagaagaatacccgcgtctattcagcagcaaaacgatttgttcttgtttatctaagcgatcttgaattttttcctgtaattggcgagaaaaggtctggtagtttttgttggcaaattcttcccgcatatctactacattgatctgcggcaaacgagcactgagttttgctcgttgattcaaacgcaacaattgataaacgcctttttgcgcccgagcccgtgactcgagagagggagtggcactccccaaaacaacaggacaatgatgatatcctccacgccatatcgctaaatcacgcgcatgatatcttggtgcctcctcctgcttatagcttgcttcatgttcctcatcgacaataatgacgccaatgttttttaaaggagcaaaaatagctgaacgtgcgccgactactacttgggcttctccccgttcaatttttcgccattcatcatatttttccccttgtgacagtccactgtgaagcacagccacagcgttacctaagcggctcttgaatcgttccaccatttgtggggttaaagcaatctctggcaccagcataatggcagtctttttttgttccaacagctcagcgatcgtttgaagatagacttctgtcttcccactgccagtgatgccttctaaaagaaaggtttgtgcctcttgtctttttgctgctgacagaatttttgaaaccgcatcggtttgttcttcgttcaatgctaatgctgcagtttggggaaatgatcgatctttgaaggggtcccgatatgtctcaacctcatgaaattcaagccagcctaatgcttgcccttgattcaagacagctgtcgaaatgcctgcttctgcaaaaaatgaaacaggaagctgatcagattcttgtaagactgtcaatagttgttgttgccgtttagcccctttcctgatttgcttcattgcctctggaattgcttctggagagatcaggcgtttcaccatacggattttcttggctttatttttattttttaccacatattgcaattcaacgactgcttcttcacgcaatactttcaattgcgacaataatcccgcttcctcagcagcttgccagctcaggctattcgtctcaggaaaatgcgcttttattgggtgcgtatcatccaataaaagaatattcttctggtattctgctttcatcacactaggcaacatggtctgcaagcaggtaatcttaaaagcaaatgtcgtttttttcatgtaatcagctaactgtaataattcttcattcaccacaggagaaagatccagcaagcgaagaataggtttcaatggttgacctggcggtgtatccgtcaatcctacgataaagccttggatatgccgatccccattaccaaatggcacttcgactcgcatgccagtctctgctacagcgcgcaaatattcaggtatttcatatgtaaaaggttgatctgtctgcatcgttggtacatccacgatcacttctgctgcataggtcatcttctctcctcctccaggctttattttactaaaatgacagacatttgtctgtaaaccttacgaaaatttaacggctatcgactcaaaagaaaaagccagaacacgcattgtgctctagcttttttaattgtctacagattctgttcgtcacgaatccgggcttccaattctttttgctcttggtctttttgcgctttgcgctcttcttgttccattttcaagcgagcacgtttgatttctggatgcggatcattaacaacaagctctgcttcgatttcttccaatgcttgtcctacgcttttcaccgaatcaaattgttccaatgttgcttgggcgcctgcatctagttcatgcgcgcgtttgctggctaaaatcacaagggaatactttgagttcacacgatccaataatgaatcgattgaaggttttaacatcattcgttttacagctcctctaacattttgatatacttgccgattactcgatcaacgcgaaaatgttcacttgatataatttctcgaatccgttgtactgctttagatacttcatcatttacgactgcgtagtcatataaagccatcatttcgatttcttctctggcaacacgcattcgttcatcgatcacttcagcagaatctgtccccctgccagtgatacgtgagcgtagctctgctaaatcaggtggggtaagaaaaataaagaccccatcaggcactttttctttgacttgtttagctccttgaacttcgatttccaagaaaacatctttcccttggtccaatgttttttgaacataagacaacggggtgccgtagtaattgccaacgtattctgcatattccaacatttcgcctgcttcgatcaaggcttcaaattcctcacgggtgcggaaataataatcaacgccttcgatctcaccttcacgcttgttgcgtgttgtcatcgaaacagaatattgaaaatcgttgtcatcactttcaaaaattgcttttcgcacagtgcccttgcctacaccggaaggtcctgataaaactattagtaatcctcgctctgacataatgacgtcctttcactgacttttgcttaacgtctattttgcactttttttcagcaactttcaagaactactttattataatgggaaattcatgaaattactactcatctctcctacttttagaaccccatgttgcttagcgtattgatcacacctgccaactcatcttttgtcgtgatagctttctccgtaggatcttctacttcctggcaatcaatccgaacgatataccgacgattcaacgatactgcatttccattgaccaaaatttgcaagaactcttgatcaatcgcgacacaagcatcttgccaagcatcaaagtttgctttatctgatgggacgctccgcttaatgacgttttttccgcttaattcatgaaaagtaatatcatagtatttcattgttgatcactcctattcgatattttggacttgttctcttattttttcaataatcgtcttcatctgtactacactattcttgatttcaattgggcttgacttggaacctatggtatttacttctcggttcatttcttgaatcaaaaaatccagctcccggccgatcggcgattttgcctctaacaaagtagtcatagaatctaaatgaatcatcattcgatccaactcttcatgaatatctccccgctccaacaggatggccatctcggtcaacaaacgttcttgatctacttgctcgcctaaatattccgtcagctttttctcaaaacgttggcgatgatcggcttcataaacggcaataaacgtctgtaattccatgattttaccaagtaattgctgctgattttcttttaacacttgataaatcccttgtccttcaatttcacggctttgatcgatagctgttagagcctgagacaaagcatctaacacaccttgctctaactgggtatcttcttgttgtttttctcggatatcaagaaatgcttcatggacgattaatttttccaaaagattttttttcgacagctcttttatatccaacctttgagcagcttcttcttcgacctgcttcaaaaaaggcaccaataaatcccattggactataacttctttatgagccgcattcttttcgttcaatgtcagataaagctccacccgaccacgctgtaatacttttttgacttcttgtcgaattagtgcttccaaatcattcaattgtttgggcatgcgcaactgcaaatccataaatcgctgattgacacttttaatctcaatctctatttgataatcagctgtttctccattcccttttccaaaacctgtcatgcttttcattcatttcttcctttcacatagaaagcagtgcttttttcaattcggtgaattcttcatttgataacgttaagcctttacccattttttcatgtcctggactccagtcacgcaagtcaaacttaggcgggcgaccattccagctgactaaattaagctctttacgccaccctttaggattttccgaaagaacggcgatctcctctacgatctcataagaaaaattatccattgtgttcctctccttttaaaaaataagccagataggctgacagcacagccaattctggataccgcgcacgaatctgctgaaatgccggtgtttcaatttgttgggttcgatagaaaaacaagaaccgtttttgttcagataacaaaaagaactgttcgcgatagtaatacaaccattctgacactgaccatacttctgtttctttcgttggttctgccatgattttctcacgtatcgcttgcaggaaagattcctttgtataaatgacggtcggtgtaagatgtagtaatctgcctatgcattcaaaaaagacgcgcccacaaatttccaaggggacctcttgctgatataacttacgcactttcttccaaaattccttttttttcataaatgcgtacaatcgcggtgcatcttgtcgaagcaaatgaacgaatggcttccacgaatcgttgaagacctcttcatcaaaagtataccaatagccactgaacttgccaaagtatttcatcgtttctaaatacccaagagtcatgttttctagagaacgtttggcatcaaaaatcaaaaaactacctagagtccaaggtgaagcaatttgaatctgcgcaattgattctgagacctgaaccttcttattgattccaggcccttggacatcgacggcaatgacttctgtagcgcctcgctcaatggctacatcaattggcagattgttgcggtaccctccatcaatataatagatcccatcaatcaattgtgcctgcattgctggataaaaagacgctgatgctagcaaccattgcaaactataatcaattttgctggaatcaaactgataaacaacctctttgaaatccggcagacgagtcgtacaaagtaagagctggcttttgctggcattaaatttttctgcatcaaaagtcgctgctaacagctgtgctaatggttttgtactcgcaccattgtctttaagtgctgtctttacgagtgagcgtaattgctccatcatatctaataaggtttcttttttagcagcagcttttgggtattggaggacctgttcactagaaatattcgtccataattgctcagcagcttcaatatcgtccattaaaaccaatgcaccattcaatgcaccaactgacgtccccgctacccactcaaatatgattccatgttttttcagcgcttgccatacgccaatttgataggcgccatgggcgcctcctccacctaggacgaaagctgtatggtagtccagttgcttgtggtacccctgtgtcaccctaccatatccacgtcccacaaaccactgatccatgatggggtttcttgtcatttcccaaagtatctggtctacgaaacggcttctagcaaaactctcagtcatcgaaacaagtgtctcccaagtaaatgcatcacttggcacctgcaacaaattctgaatggtcagaagcggcccttcatggacacaagacagatagactgtgccgtgttgattcgtcaatcgccacccctgttcgttgaccactgattgaaaagcggctcgcgcctccgaatgactagaaaaaaaagggaaaactagtcggctttgttgaaacacatcttgggatacatataaatcagaaaaataaatttttgttgtcttcatccgactcctcctcaaatgcaaaaaagaaaccacggatgatcaatgaaaatttctgacatcattcgtggtattcttatcatttaaaaagtccgctgttccatattgaatgcggcccgcatctcgtctgtcgcatcagcaactggtgtaaccgattcaagatcaccctgaaccacacgtctggttactccacccatttcaccacatgtaattaatgtgatcatttttctccctgctacttcatccaataaataaacatctgttggttgaacccgcacggttgaagttgctgtatatgtataaatattttctaaatccgtaatataaattgttgcgccaatagccacatcatctaaaggtgtgaacaaaaggtctggcgactgcgcacgatggctagctagtgcataatttccttcgcccattttttgtgttgggctaagagttcctgctccatatagcaaagcttcattcgataaccccttaaaaatcggcaaattaatcgctacgctaggtatcgcaacaccaccgatcactggtaatgtgctgttacttagttgcgctttaagaactgcttctgagctggccggttcaacggcatcaaaatcaaaagtagtatctgcctccatattttttttgacatcggctctagagatctcggaaactgcgtaagcatctccgttgtgtttaatcagaaaatttttgatttgattattaaaaatcaaagcaagaccaatcaataacaaaaggaccaaaaatagattcgagagccaatggaacaaagttcgtttctttttcatcgtttttcgtctccaatttttattactcctatcataacaaaatcattgcagaagcgccaattttggattttttttaataaaaaagcaaagttttttgcttcataaaaaaacgtaatcttaaaaattgttttttccgttattttgtaatataactttaaacgaaaagatacaagcaatttgatacactttattgtagaatgaacttattatcagggagggattaattggcatgtcgaacacgatttatgtacatattgatacaaccagcaatgccgtttcgactcgcggagtggatgctcaagatttcaacaagagcatcgttcaccagccaaaaaatctgttgttgcttgatccctctagtgaatttggtgaatttgagtcgcatacagggctaaagattatccgaggcattgaagatgtccaccttttctttcaacaactcaaccgcggacggatcacagaagaaatcaaatggatcgactttaatgatttagaaatggtaaaggagctaacaccgctagaaatttcagaattgttatattttgggcatatgaaaacgcatcttcattctccgtttttctacaaactgcaaaacaactttgtttatttcgacctcaaagatcagcgttcccgtgtttactaccgctacctggaagaatattaccgaattttagctgacaaaatcacgcacatcgttctagaaaaaataaatgatcgactttctttcttcaaaaagcctactccggtctctaaacttgatttaaatcttctcaaagacttgcggggggtcatgcaggaaggaatcatcttatgtttccatcaagaacaattggtcgataaaacctacacaatcccgatttacttagtcgaggaatctgggctcaaaaatagtcacctctctctgaaagaagactatcaagtggcaacgcttcgctactttgcaaataaaaaagaatggcagttggaattggatcaagatgatctagcttttggttttatcgataaaaaatgacttgctctcctattttgattttggagaacaagtctttttttacgcagtccgatttaaataatcgtccttaggtacaaatacctctggggatgttcgataagcaattagtaagataattgccgtgacgattgccgtagcaagtccgctggcggtattcattaccagagagaaaagccaaggtttcatcccccagagagcatatgcgccccagtaaacccaaccggcaaggaaatgccaaaaataacgagcaaatgcgcctgtgaatgttgcttgtacaagtagtcgttgcacgctacccttcgaaccatttctaatcgccaaatgaattttatttgcataaagtccggcaaaaccaacaaatgtaaaagcaaatgggtactcaatcaatacttgaagaacactcaaaaaccagactttacctaatgggaaatgcagcaatccccaaaccaatccggccattaatcctggcttccagcctctacggatagcaaatattgttaatggaatctgtcctaaagaaattgaaaaactacttccaaagtctaaaggaatcagcgatagtaccatcgccagtgccgccataatcgttccctctatccaaatttttgtaccatttcccacaaaaaaactcctcctttagaatcatcacaattcacaaaggagaagtgttagacacttcaactcgtcacaattcctacgttcgcatgatcgaaacaggtacgaagggtttagagtactctcattctcagccttttcagactcccctttgtgattagattctattttattttgcttgcactgctgcaagtcatcttcaagaataccacaaaataaaaaaaagaaaagaaaactcgctctgataaaaaaagaaacatctcaaccgcgtctagacgagatgcttcttttgggttatcatttttaaatcgataattttgattcaaacagtggactaacaggtttattctcatggattcgtttgattgcttctcccatcaatgcactaacactgatttcgtcaattttttcagatttacgatcttctggcaagaaaattgaatcagtaactactaagtgctcgatagctgaatcttcgatccgttgcaaagcaggtcctgataaaacaggatgagtacatgaagcataaacactttttgcaccagcttgttttaatgcgttcgctgctagagtaattgttccggccgtatcgatcatgtcgtcgatcaagacacacgttttgccttctacgtgaccaatgatattcattacttcagcaacatttgcttttggacgtcgtttatcaatgatcgcaattggtgatttcaagaattctgctaatttacgcgcacgagtcactccgccgtggtctggtgaaacgactacaacgtcatctccttgaatatctctttccaagaaataattagcaatcaatggtgcacccatcaagtgatctacaggaatatcaaaaaaaccttggatttgtgaagcatgtagatctaaggtaaccatacgatttgcgccagctttttcgatcatgttcgccaccaatttagcagtgattggttcgcgggaacgagctttacggtcttgtctcgcataaccatagtaaggcatcactacattgattgttttcgcacttgcacgtttcaaggcatcaatcatgatcagtagctccattaggttatcgtttactggactgcttgtggattgaataacatagacatgtgaaccacggatactttcttcaatgttaacttgaatctcgccatcgctaaattggttcactgaacacttacctaattccacacctactgcagctgcgattttttcagctaacggacgattagaattcagcgaaaaaatcttcaatcttggatcaaaataatgatttgacatgagaacctccactttctttgcgttcatctggcaaaaagactactagttcaccagaatcttcttcctagtaaatagtagtcatttttgctaaataaatcaagtcatttcgcagtttcttcattcaaataaggcaatttttttgcatagccttctttgttttcctgccttgctcgggcaatcgccatgctatgtttaggaatatcttttgtgattgtagagccagcagcgatcatggtttcttcctcaatctgcaatggcgccactaaattcgaaccagagccgataaaacaattgtctccgacaactgtcttgaatttatttttgccatcataatttacaaagacgacgccgcaaccaacattgatatttttccctagcgttgcatctccgacataagagagatgccctacttttgttccctcaccgatcgttgcattttttatttctacgaaattaccaatatgggctctttctttaatgtctgcttttggacgcagatgtgcatttggtccgacatctgccccgttgtagattcgactttcttccaccacagatgccttgatcgttacatcatcaccgatttgactgtctatgatttgagaagatgcagtgatgacacagtcttcaccaattttcgttgcacctttgatgacgacaccagcttcaatcagtgtgtctgctccaatttccacgccatcatcaatataagtagtatcagggtcaatcaatgtcacaccattgcgcatatgctgctgattgatacgcttgcgcatcaaacgattcgcttctgccagcgctaatcgatcattgactcctaacgactcattgaaatcatccgtttgataagcagctacaatcttcccttctgctttcaagatctcaataatatctgttagataatattccccttgtgcattatcggtatctaattttgccaatgcatcaaataataattcattgtcaaaacaatacgttcccgtattgatttcttggatcatcgcctcttccacagaggcatctttttgttccacgattttttctacgacacccatttgattgcgtacaatccgaccatatccggtcggatcttcagcttgcgcagttaaaatcgttgctgaggctttttgttcctgatggaactcaaaaagattattcaatgtctcagtcgttaacaaaggggtgtctccactgattactaacgttgttccccgtttttctcttaagaaaggctctgcttgaacaactgcatggccagttcctaactgttctgcttgtaaagcatactcactgcggtcccctaattgttgcttgaccatttctgctccatgtccgacgattgttacgattgcatcaggttctgtctccactacgcgattcatgatatgttctaccataggttttccgcaaacgggatgcaaaaccttgtataacttggatttcattctagtacctttgcctgcggcaagtataattgcaaaacgtgattccacgtgttccactcctatcgattccgactgattgatttctgtatatgtccagtttagcccaactaaggatggttttcaatatataaggaaaaacacaactagaccaattaaaaaagactgattcaaaatcagtcttttgtttcaaaataattccccggcacgaccgagatcgttttcgtctgagtatcaacgtcttcaacaaacagcagcgaactataatcagaaatagcacgttttcctttgaatttagcttccgcaaaaaccgttatgccaacaagttcagcttcaaattcttcgatcaagctcttcataccgttcacagtgccgccgcctttcataaagtcatctacgactaagactttggaaccgcgttttaagctacgctttgataattccattttctcgattcgttcagatgacccagaaacatagttcacgctgactgttgacccttccgtaattttagaatctcgccgaacgatcacaaagggaacatttaaataataagataccgcttgtgcgattggcactcctttagtagcaacagtcatgactgcatcaatttgtttatccagatacttcgaagcaatgatacggcctacttgccgcagtagctcaggttctccaagcaaatccgagagataaacgtaaccaccaggcagcagtcgatcttgctcagaaaggcgttccgctaacccttcaacataggcataggcttcttcttttgaaatctcaggcacaaaaaaaacaccgccagctgcacctggaattgtatcgagagttcccgtaccacgttctttgaaggtctttttgataatcgctagatcttcactgatcgatgatttagcagaagcatagcgttttgaaaaaaatgacaatgaaatcaattcatgcggatgattcaataaataatgtgtcatatctatcaatcgttcacttcgacgaattttcacacatgcccactcctttaatttattcgtcttattataaggctttttgcgtataaatgcgagcattatcttgaaaatctaaagaattgttcgcttttcattcaatcaaagaaaaaaagaaacgaaaaattttcgtttcttatcgttttaaccgttgttttcgttggaaaagaatgacaatacgcttgaccacattgatgactaaaaacaaaccgataaatactaatgtgatcgtagcgcctggaggtgtatcgagataaaaagagctagtcaatcccgacagcataccgaatagaccaatcaagacactgatcaaaatcaccgcattaaaactcttgcctaaacgcatactgattgcagctggcaataccataatcgcagaaatcagtaacgcaccagcgatgggaatcatcatagcgatagcaatccctgtcaaaacattaaaaagcatcgacattatccgcactggcaaacggtctacatgagccgtatcctcgtcaaaagtcaggacatacatcggacgtttgaatagaaagaagagaacgaatacagctaaaaataaaaagcctagaaaccaaacttgatcctgagtaatggtcacgatggaaccaaagagataggattggatactggtcgctgagtttcctccactcagattcataaggaccaatgctaatgccaaaccgcctgacatcaaaatcgcaattgagatctctgaataactccgataaagtgttcgtaaatattccaaaatgaccgcggcgatgattacgattaataaggtcgtgagatctggattcaaattaagaaaaaagcctaatgctacaccagctaatgaaacatgtgagagtgtatcggccatcaaagactgtcttcggatcacaagaaacacacctagcatcggtgcgattccggcaataaaaattgcagccaaaaaagcacgcctcatgaattcatatgaaagcaacgccatggtgaatcctcctttcgaaccaaccgaatttgtcgatccgcatactccttaatatcttcgtgatcgtgggtgatcatcaaaatcgatttcccatgatcgtgtgcattgtgacgcagtaattcataaaataaatttcgtgattgctcatccatccctgtcgttggttcatccaaaataaataaatctggatcagtcgcaaagatacgtgctaaactgattcgctgtttttgccctccggacagttcgccaatccgttttttgcgcatttcccacatacctactgcatccaatgctcgccgaacatgttcatgatcccgctttgtcagcttcttaaaccatcggtctttcggataacggccagattggaccaattctaagactgtacttggaaagcctacattgaacgaggcaatctgttgtggaatatagcctacacttagcttttgtccttctctgtttttggtagccagtattacttctccctttgatggtttcaacaaccctaatgttgctttaatcaaggtagattttgcagccccattttctcctgttagaatgatgaattccccatcttcaacaaaataagagatatcctctaatacaggctcatcatcataataaaacgttagtccttttacatcgatataacgcacagatgtgcctccttacttgatacttttttgtaaagcttgcagattttccttcattactgtgagatatgtttctccatcactaatctgtttttccgtcaaactttctaacggattcaatacagccaattcaaccccagtctcattcgctaaagtttccgcgactttagaagaagcattttcttcaaaatagataactttgacttgatgatcctcaacatattcttttagctctgctaaccgactaggagttggttcttgatctggagataatccagcaatcgattcttggactagatcatattgttttgccaaatatccaaaagcggcatgttgtgtgacaaatgttcgattgaccgcatctttcaaagcagcagtgtactcttgatccaatgcgttcaattgctcaatataagcagcggcattctttttaaatgtagctgctttcgttggaaatttctcgcttaactgatctcgaatcgtttcaacttctttgattgccattactggatctgtccacacatgcggatctaattcatgggtatgggcgtctgtcccatgttctgcttctgcttccgtttctccatggtcttcattttcagctaaatcaatctctttggccgcttcgatcacaactgttttgtcagtatcgatcgaatctgtcattgttggcacccatgtttccaattccggactattgtacacaaaagcatctgcatccataatttttgccatatctttcgcactaggttcataatcatggggttctgtgcccgccggtataagcaaagatactttacctgtatctccaacaacctctttggtaaactcatacattggataaaaagtcgtaataacctgcaaatcctgactttcttctgcgacttgttctgatccttttccgcaagcccctaataaaacagtactggtaagcaaaaatagagctagtaattttttcatgatgattcctcttttcttattaaaacggaactaatccgatttatcagcaaaaattactctaccaaaggaaacctcattcgtcaagacaaatcgtatgttttccgatttagagcgttcctctgccagtaaatcggaaaacatgggaaaattgattcatatatccgctaagcaaaaaacagatgtcacattttttgaatgtgtgcatctgctttttaatttgtccttttgtttcctactattttaatgtgcgaactagataaacctcttcacaaaaaccttttaaagcattatacactcgctgagcccgtgagtatttctggcacaaggcaaaaacagtcggtccacttccagtcatcagtgccacatccgcaccatatttcatcattcgttccttgatttgttgtacgactggatgcttaggaatcgtgatcgattccaaactatttcccattgcagcaatcattcgttgataatcttcagcaagaattgcatcagaaagttcttgaatatctggatgatgcaactgatctagatcaacttcttgaaaaattttacctgttgaaacacttagtcggggcttgactaagaccacccagcactgcggcatcgggcgcaacggcgtgactttctctcctttaccagagatgaacgcagtcgttccataaatgcaataagggacatcagtacctacttccattcctatatcgatcaattccggcatcgtcagacctaattgccataagcggtccatcccccttagcgctgctgcacaatctgtactgccaccgccaaggcctgctgctacagggatatttttcgtgatccgaatcaagatacctttattgataccatagcgttttttgacaatactggctgcttgatatacattattgcgtttatcgatcggcaagaaggccttattggtttcgataatgattttatcttcttctagctcttccattatcagacggtcggctagatcaacactggacatcaccatttccaattcatggtaaccgtctgctcgcttacccaaaacatcaagtcctagatttatcttagcaggcgctttttcaataatttccatcttattcacccaatcatctgatagttaactagttctatcatagcagattctttagagatagttgagatatttctcctgtttttgatctttatcagcttttgggttgctctttgaaatcgttcctcgtaaaataagagtaacaaatttgatcaagaaggcaggggaaattatggcaaatctaattcctagagatctacctggtggagaagaactattaggcaaattgatgaacagtttctggcaagaacgacaaatgaatacagatattaaagaatatgaagatcattatgtagtcaaagctgatcttcctggtataaaaaaagaaaatatccgtgttagtttcgtgaatgatactctaacaatttctgcttcccaaattgaagaaagcgaagagaaagatgatcttggtcactacttgcgtaaagaacgatctagcagtgcttatcaacgtgcattcactatacctgacattgatgaagaagcgatcaaagcacggttcgaagatggtgtcctttccttgaatttaccaaaggcaagttacaaagacgcgccaggtaagcatattccaatcgaataattgaattatcgcaaaaagtaaaaaagacttcagaaatatcagtttctgaagtcttttttgttgtatttctaccttgccttaccagtttgacgataagcttgtcgagttgttgctgtgggtatttcttcttttttgacataaagcttcaaactataaggttcatggtattttacatcatttttgacaaaatctccgccagtaatgaacaacccaactggttccaaagctttttccccgttccaataaatacggccaattgttgttaagtcactatagctcgtaccaatttgcaacgagtattcagaatctgaccgttgtttgacaaagtagtagggataaagggtatttttaggaatcacaaatccttgtgcgatagcattcgttgctaattcatcttttgaaatgagtttctgtaaatagtcagccaataccagttgatagtcttcttcaaaatcaataactgctttctctgttgataaacgatcgatttgtgtggtgctaattttttctccttcaatattgaatacttcatcaggtaaatacttcacaaaaagctgagtaatatctaccttaagatttttatcaaaaaagtaataaaaaatatttagaacccagaaatagagcaacacgcagaatcctatcccgtataaagccatctgtaaataattttgattgagatagagaccataaacaatacgcagaatataagccgttggaatcaaactaagtaatgtataggcccgattcaagtatttaggactaatatccagataacctaagaacttatgaatcccattgatcatatctaataaaaaagtcatttattcacctactcattttcttgatcctcattgatgactgcttcttggtcagccgcattctgatcctgacttgacggcgtcgtttcctcgctttgcccgttctctgaagaagggacatctgtagctggtggtgtagagctatcctctatcgaagatgaaggaacagttcgctgattatttgttgtggaagatgtagtgcctccatgatcttcagctgatgttgaaggttctgtgctttcagacacaggttgactgtctaccgattgcgagtgactaacatcgctggtttcggtcgtttcagtaatctcagtcgagtgactagttccatttgactgccgatagctactggaattcacaacaccagttgcagtagcgatgatggttgaaatggtcaagagagcaattggtttcaaaataggaggtacttttcgcataattttccatccttgtcttgattcttatcttttttgcactcattgagtacttactttctttatagttctttccttggaaatggtcaagactacgaaggattaacggaacagatttaaaaaaaagtaaaaatgttttcggttacaaacaaaaactagcttctgctaggctctaaataagaaattcgtaaaacttttgtacagaacgagttaacgcagagtgataatccactatcagctcttttaataagatcgattcttgtagctcaaatggctcagtcaattctaaagtgatccgagcaccgtcgatgaaataagcataggacagttcatcatcagacaattcggctagttgattgctccactcttcgaagaatttctccgcgagcacatctccaacttcctcaagaacaggttggagagtctcttctacttgataaaaaggtcgtgacaaaatagatgccgttgtctttgagtgggttgtattttgaaaatccaaataaagcaagtcaatgtagtcttcttcttcacctgtttcttccagccatagaatgccttgcttgaccaatgagacacatgtagattctacttcctttgataattctatagtagcatctttgaacctcagattcttttcgactatttgctcttcacccataaattgcaagacagctttttcaaaaacgagcggctcatctgtaataaataattgaattgttgccatttttttctctctttcttttttatctaatttatttttgctctaaacagattatttgtcagcggtatgaatcttcgttagcatagaaattgaagatgaataaaagctaatttttaaggaggagatttgatgagtaaaattgccactatcattaccgatctagttgaagatattgaagtaacctcaccaaaagaagcactggaaaatgctggacatgaagttgtcattatcagtaatgaaggcgtggacactgtcacaggaaaaaaaggaaccacttttgcagttgacgcgtctattgatacaatcaatttttccgattttgatgctttgttgattcctggtggcttttctccagaccaattacgtacagatgaacgctatgtcactttgaccaaagagtttctgacatctgaaaaaccagtttttgctatctgtcatggacctcaactctttattcaaaccggattgacaaaagaattaacattgactggctatgattccattcgtccagatttaacatatgcaggtgctactgtcaaagatgagcctgtggtgattgacgacacgcatcatttgatcactagtcgtaatcctgatgatttggatgcatttaatcaagccattacaacagcacttgaaggcaacaaataaagcctaaattttaaacgaagaactcacaaatagggtgtacgaatatcgtactccctatttttctatcctttagcgattttacctgctgtttttgttcgcaagttcttttaattaatatttctattcatccatagaaatgtcaaaaccatcaaatgtctcaccatcataatatttaagtaattcatcgagtgatagcaaagaagaagtcatctcctcttcttccgtttgttggtgtttttcccaatagatctgataggcttccgccaattgtcgatagacatctttccgtgaaccaccttctgcctgcagcattggcaattctcgaataaacgcactataacaaggacgaccatcttgccaactgataggtaattcaatcacatgtagttgggcttcttcaaaccatctctccatcccgatccctcatttctccctttattatcacgtgaatgattcagaaggtcaaacttcctgtcaaaatagactaaaaaacactggctaccgatggcttatccatgatttggaatagcaatcggcagccaatgatcatgcagctacataagcatatttttcaatgttttgtttgatcttctcaatgattctctgatcctctacacctgtgacttctgtgatcacttgagaaagattagctgcttccaataactctctcaattgttgactttgctcgtcctcaggatcatgatagttgaaaatcataccaatcgtttcatagagatggaacggttgcacatttctcatttgcaattcaaggacggggcggataaatcgttcttgtgcgcttaattttcgcaaaggagtgcgggctactcgagcaatagcatccgaaatgtagttatttttgaatcgttgaataattttttcaatatactgttcatgttcatcaggatcaaaatcccatttggcgactaaaagttgaccagtttcttctagaacggatttcagctgaatcacaactagatggtcacgcatggcttcatcgatggtctcatagccttgtagagctcctgtataagctactgtagcatgacctgtgttcacactaaacaatttacgctcgatataaggtttcagatctggtacgtattgtacgccttgtagacgaagcactgatttcattgctgtttcttgaactacccactcacaaaatggttctacttgaaccaacaaaggatcatcatgttgttgcatcggaacaatgcgatccactgctgcatctggaaaaccaacactattctccaggtaagcgagttgttggctatacttttctacttcctcttttagaaaagtggatccaccgatcatattttcgcaagcgatgacatcaattgcttgctcctttttcttgattgctcgctgatccagcccttttgcaatgagcggtgcaatgcgaggcaatactgcaggaccaatggcagtggttaaaatatcggcttcgacaattgcttgaacaaccgcatccggttcttttgcgttattgattcctgtcacgtgttcaataaaaatctgttcgcggttctcatctgctaattcaattgtataggatttacgttgctgaagcgcagcaataatcgtttcatttacatcaacaaaggttatttcaaaaccgtttgctgccaaaatctctccgataaaccctcgaccaatattccctgcaccaaaatgaactgctctcatctttttcccctcctatgccactgttagattagcggcgacttcttctttgctcaaagcatccgctaattcgaccacattatcgatatcgctacagaagagagcgatttgttgtaccaactgcaaatgatcttcacctattccagcaatgccaaataataccgtaacgattttttcatcctcatctgtcccgaaatttacgccttcaggcacttgaacaatgcagataccagattttttgacatatttttttgcttcatctgtcccgtgtggtatagctatgaaattccccatgtagacagataacattgcatctcgttcgatcatagcgttgacgtattccggatcaacatatccggcctcaacaagttttttcccacaataacgaatcgcttcttctttgttcgcaaactgttgattcagctcaatcatttctttttctaatagtttcatttttcttcctccttaaagagcttctttaagtgttgtgattacacgctggtagtttgacgttcgcatcaaattgctgacagatagatggactgcatctggtgctagcgaccgcgcttgctttgtcagctcttctttggtaattaccaatgatgaagcatccgcttttagattatcgatatgaacctttttaagtgataaagagagagattctttcgctaataagtcttgaaaaacctttctcgccatggtcgctgagccttcacgatcgtcatgggcaagaataacttcatgaatgccctttaattcctctagaggcagtggcttataatttactgctttcgtttttttctcttcctcaactcctgagcctgacaatgtggccacgatctcattatatttaggagaattcaaaaaattttctacagcaacaaatgttgcatttggtgcttttaattttgcccgctcttgtaactctttttgtgtcacaatcaatgtatgcgcatcatctgtcagattattgattgcttgattagtgacttgttgagccaaaccagcatctttaactttcttacgcaaaatggaagcccccattgcacttgaacccataccagcatcgcaggcaaaaataatcttctgaatgcctgttaacgattctagagccactccttttgaacgctgttttgcttggtgtatttcctgtaccttctcatcaaaattatctacagtgtctttggcatcggcttttagaattgctgccgccacaagaaacgatatggttgctccaacagcaatccctgctaaaacagagacgacactcatcaccgaattcaacggtgtcatcgctaaaatagcaataatcgaacctggagaagctggtgcccttaaacctgcacctaataattgaaaagtgaaactcccagaaacacctcctgcaataacagctaaaaacattaatggcttcatcatcacatatgggaaatagatttcatgaataccacctataaagtggataatgattgctcctggagcagatgattttgccgcgcctttgccaaagaaagtgaatgctaataaaacacctaatccaggccctgggtttgcctctaataaatatagaattgatttaccaaactcgcttacttgttccgtacctaatggagtcagaattccgtgattgatggcattattcaaaaataggattttggcaggttcaataaaaatatttgctaatggaatcagatgtgcattgacaatcactgcaacgcctgctgccattacttctgtcaatgtgtttacaacaggtccaatgacaacaaagcctaacagagccaaagcaaaacctagaagacccgcagaaaaattattgactagcatctcaaagcctgcccgcactttatcttgaaaaaattcatcgaacttcttaatcgtatatccgcctaatggccccataatcattgcacctaaaagcattgggatgtctgttcccacaatgacccccattgtagcgattgccccaacaactgcgccccgatctccagcaattactttcccgcccgtgtatccaatcagtatcggtattagataagtcagcatcggaccgaccattgaagcaaaggattcatttggcagatagccatctggaataaagagagccgttaacacgccccatgcaatcaatgcgccaatattgggcattaccatactcgacaatgtactacctagtttttggaccctcgactttaaagacgcattcctgtctgcttgtacttgttccatcttcattctcctcccaacttgtttttacaccttgattgtaggcgctttccgaaagcttcgaaagtcgtactttgtcacaggaaactgtgccaaaatttgtctcttatctacaaaaaaaagccatgcataatgcatgactaatcaataaatgcccttttctactcttctagcgatagtattttttggatttcctctattgtagcggcgtcgcttaatagttttacattttggatatctgaacaaaaaaaagcaatttcttgcaagcatgacaactgcttttctttgagaacaaccacaaacagaatcgtagtaacctttgattcttttgcatcgccaaaatcgacaccgtctggtacttgaacaagacaaatcccttcttcattaatccatttgtctgcctcttcttctccgtgaggcaaggctacaaagtttcctatataaacaccatattttttgtgtcgctgaattaaactgtttatatactgaggttgaaccattttttggtctactaagaatgtacctatctcatgcaatgcttcttctgcactttggaatcgctgatctaacaaaatatgtgttgctggaatatccactattttctcctccccattattgtttgatttcttcaatcaaaagcgtagcaagcaattgataaatgatggaaaaatttcctgaattaaatatttctgtattgagatcattcataatgatggaaccgctaatcctccctaagattttactgctttgctcatcgattggataaggagcgagcataactaacaagcgagttacgttaatctcttgtttatccatcgcataaagtgatagtccttgtgataaatcaaagattttgaaaactggttgcaaaatttctgtacttgacgcatgaaaaagggcaaagtgagtcttcggtattccaacaggggcttgtaaatagcgcttcactaatttattggctactttttttctgtcttgcactaacgctttggaaaaatgtttcatcacttcagataatgtttcttctaagttggggccattgtcaatcgtttgaagagtaaacaattctaataagcggttaatctcctcaataaatgctagaacatcttcataggtatcttccctagtagaaactggcgtaggtattgcatgagaaagtctctttttctgactaagcagacgaaattcttcttttagttcctgaatgtcttcttccaataaaataggagatactagcttatattttcctcgataacctggcaacaaagatgtggaaatcaccaagtcgtagttgccctcaattttatcctgttcgatatcccccacacggaaaaaagtaattttattgataaatggaaattgctttcttagctgcatctctaacaaactaattgaagccagtccgcttggtgatacacctgcaatattgacttccatcactttaggattcttttctaatgagtttgcgaagtgcaataccatataggcaatttcttctgttgaaaactgctgttgtgggaaaacaagcggtaagcttaaacggattgcttctgcaatttcctcatattgtttcattattttttctaaaattggattgtttagatggttctcttccaaaatcgctcgggtcattaccccagaaatatgtgttagcaacattttatataaaatttcatcttcaaaaaaatcaacctcagtgtgctggctaatcagttcgatcaaccgttttacctgatatgccaaagttgtatcaaaattctcttcaaaaaaatcgcggtcaaaagaattagaaaaatcccctaataaaatcgcaaaaaaaactatttcattaaccgaatacaaccgcttcgtttgttcagcaacttgagcaaaaatctgtttagctacctttagcaaatctttgttgatttgacttggataactttcttcctctactgagaatcctgttgctactcgctccatggctaaagcaagcataataccaataaaagccaacttgcgatcacttaactcaggatatttagattcaaccacttctcttataagatcttgcgctaaaatcaagtactgtttttcaataaactcaaataaaaaatgcgccgtttgttctgcttcaggaaaatgaaaaaactggtattcatttatttccatcatcaacgtattcgctgctactaaacgtcgatgtttttctggtcctttgagctcatatccttgattacggacaattgtcaacggaaggcgcgccaaactttcttctaattgtttaatatcagaaaaaaaagtagtattactgatttgatagagctctaaaaaacgatggctactaatcggcttagcagtagttgctaattgcagcaaaatcctatgttgtcgctctattgacgcaaactcttgggatggatcagacataattgcttcttgcagctgagtgatactattcccgacaatgactcgaaaatgtccacgaccttctttttctaaggatgcccctacagtacgtaacgaattctctaaattggctaattcgcggtagacagtccgcttacttactttcaaaagctgcatcattcggtccatagaaacaggaccgttactgttcattagctcagtcaacaaaatagtttcacgcttagtcaagaacataggcgactccttctgtcatcaattgacgatatttggaagttgtcactaaatcatcgacaactaagtgggtgacatttgttaatgcagccatttgctgaaaatctttttgaacgatatataatgcctctggattaaactgggttgtctcaatatcttctttctttacctcaataggtatgtctaattcattggcaattttacgaacgattgcaacagccatcgtttgagcgcctcttttcttgccttcatacaaaaaaatcaatgttgggattttttccccaactttaaaagaaacatttgctaccgtttcttgctcttgctttaaaagtttaactagtgtttcatactctgattccgctaaaaagttactcaagaagtaatgttgtgcttgaggtgtctttgtttgagctaaagcaccaagccctgattgggtaataactaaaagatcttctccatccttcaactgataaattgaattataatcgacaggtatggaaatggctgcttcttctaaatgtttaattaataaacttgccccaattgcgctagatcccatccctgcgtcgcatgcaacgataattctctttactttatccatacatattgttccttccgtacttttttcattcactgagtgataggtcaaaacaaaataggcaacaaaaaaagaaacaagcgtgcttaccaatactccagctaatacgcctgaccacatgtgatttggcgtatttgttaagatagccaaaatagaacctggtgaagccggtgatcgtaagccaactttactcaattgaaaaataaatgtaccagtagctccacctaaaatcggtgcgataatcaataatgggttcattaaaataaatgggaaataaacttcatgaatacctcctattgcttgcacaaatgcagcagcagtcgccccatttcttgcttttttagaaccatacctcatacatgcaaacaagacgcctaaaccaggaccaggattggcttcaagcagaaataaaatcgacgttccatgaatactggcgccttcaacacccaacggcgtaaatagaccatgattgataatattattaaaaaaaagaacctttagtggctccagaaaaagatgaatagcaggaaataaattctgcttgagaaaaaaatcaactaaatgataactttgttgactaagctgatcgagcaaagggccaaatacaaaaaagttacataaaaatagaagacctccaattaagcctgcagaaaaattacgaaagagcatctcatagccagtctttacttttcgagaaaagatatgatcaaagaatcgaagcataccacccgttagcggaccgataatcattgctccaaaaacttgtggaaattgagaggttaaaatcatccctaaaattgcaattgctcctgaaactccacctcttattggttcaaccatttttccgccagtgtaagcaagcaatattggtaagagaaaatgtaaaatagcttcttctgacttgatcaaacccccctgatccgcatgtagtacgggtacggcaaacgcaatgactgcccatgcaataaaaatacttacatttggcatcatcatatcagaaaaataatgagtatagagttttaaaaattgaattgtttgtcctctgtcttttattcccttcatcctcctcacctacctaacactagtataatttggttttctctaaaaaggaataaccatagattatgcttcctccttttgaatgtaccaaaaaagctgacgaaaaacgtcagctcaagttattgccttatttttaccattttttatttaattaacacgcacagcaaaacttggtgcgtaataagagtagctgctaactgaaacgctttgtccagtggtaggtgcatgaatgtattgtcccccaccaagtgcaatagccacgtggtgcgtacttccgcgcgatccccaaaataataggtcaccagcttttgcttcattgattgagataaccgtgccagaatactcttgatcataggtcacacgaggtaatgaaattcctacttttgcaaacacatattgagtaaaaccagaacaatcgaatccgttcggtgtcgttccgccccagacatatggtgtaccaagatatttcattgcttctgaaacaattgctgacccgtttacagattgtgaaggaacgtttgtattgttttctggtttattttcaggcttatttacaattgtttcttgttttggtgtatcattttctactgagtcacttgttccggtactgttagtactggaagattcatttgttgagcttgattcatttgagcttgactcattcgacgaagttgattcgcctgtttttgttgtactacttgtgcttgattcggcttgcgcagcttcttcacgttctcgagctgcttttgccgcttcttttgcggcagcaattcgtgcctgttcagcctgatagctttccttttgtttttctaggtcggctttttcatcttctttagatgattgttgcaaagcaagatctgcttgcaaaacattcaagtctgcttgcttcgattgaagtgctcctacttgtttctcaagttcaagttgatttgcttcaatttcttttagttttttatcattttcattttttttcgttttaaccgtttcttgatccgctttttgttgttgaaccaattcgttattagcactaacaatcgtcgtcatagcttgaacgcgaccgatagcatccgttaaagaatctgcttcaagaacggcatcgataaaattggtgctttgtccattcacttggacatctcttgcttgttcttgaatcgctttttcccgtttttcaatacgaacattcaagtcgtcgatttctttttgtaatttttctgaatcagcatgtaaagtagattgttgcgtcaataatgcttcagctttttcattgatagctgcaacatcattttccaatgctttgatttgtgcttgagcatcagcttgttgattttttaggttactgatttcttgatctttttgttcgattttgctatcaaagtcgtctgccgcgacaagtgttggtgctacaactgaagtaagcgcaatggaactcactaatattactgatagaatacgttttttcacccttcattcctccgcctgacttttcattgaaagtttaagttaattttaaaatatataagaatatctaaagtctttttacgataaagcgattgtaacatagatacatgtcaagcagataaaaagaatgttacaaacagatttcaaataatctaccagattcgatacaaaacataacaaaaaaatgaagctattcttctttgaatagcttcatgaatggaataactaaaataacaaataaaataatatttaatagcagtgtcggtgctaagaaacgagagacaaaaaatgaagtattgactgttgctattttaaataacaactgtatccccaaagttaccatttcaagacccgtaacgaaaataatcattccaaaaaacatggtgaatatgttttggtatagcgttttatttaaaatatacatgatccacacaatcatcgggaatgcgacagcataaataccaattatgccaatatagtaaagatcatacaagcatccaatgatcaatgcggttataatcaagtagtttttaggcaaatatctggcactacataggaaggcaatcaatagtaaatgtgcactcgctatataattatcttgcgtccagcgctcaagtaaacgggttaattgtccatctaacaacatcatcaagaaaaaaaatgctccggcaaagtactttaaatacgtattttttttcatgcctatttgtcacccgccaaacgtttgataatagtaactgcttgaatatcatacatttgtgcataaggttttacatatacttttgtatctaatccaaattcatctttggtggtactaacaactgtcccaacagcaaggtcggctggagaattccctcctaatcccgaggtttgtacaacatcgccttctttcaattgtgtacttccagtcaattgactgataaccaaggacttctctttttgatcataactacttagaattccaaaagtttcgccgtctttcccgctgattcgaacaggaaaatgatttgaattttgattttcagaagtcaacaattcgatttttgaagatgctgcattcacttcaatcacacgcccaatcaaacctttttgggacataaccgccatatttacttcgacaccatctttcgtgccacgatccacaacaagcatgtcttgccatgtatctggtgaacgattaataacattggcagtaattttttcatagttagtcaatgtttcgtttaactcaagctcttctttcaatgattcgatttctcgcttgtaattttcatttgatcgagcaatctcatcataactatcgattttctcttttaaacgttcgttttcttcatacgtgacaaaaagtttctttacagagtttgcaccggtttcgatccaccgtactggagctgtaatcaccttgtccacgataccaatcgtgtcgttgactgccgattgcacaaaactggatgaattcccaactgctcttctagcaatcgtcacactcaacacagaaacaactaaaatcacaataattaacgtgattatgatatttttattaggattaaactttttcacaaagacacctcaatgagttccaaactgatagccttaattttaccactaaaacgatgtaaacaaaagttaagttgtacgtcttaatgctttttttgtaattagctttctgaaattttcaaaaataaaaaaagagacttgactgtctcttaatctttgctttgaataacagcaataattcccgtttcaaatataaaggatgcttcatccgttatgaattcattactagcaaatgatgtaggatgttcaaccttcacattttccaataggtatttgctttccattaatgaaagattgtcaatgggagtcagacaacaatatgccagatatttcatgcccttttctttacgtacggaatacttccctggcaaaaagaaccgaatgacattttgcttatctaatagactaatattatgagcgaaaggctgaaaccgtttctccagtacaatccataaatttgctaaaaaatgatcgattcttccaccagttgcaccgataatatcaatctttgcattgggaaaatgctcaatagccatcaataatgcgagttgcgtatccgtatcgtctttttctgccggagcttgaaaaaaattttttgcattctgtcgcactcgttctctttcttcagaagaaagagagtcaaaatcaccaatcgcaaaatctaaaggcaaatcctcctcaagcagataaaatgatccccgatcaataccaatgtatttatcatacttctttagagacggccaagtttgctttttgccacctgcaactagaagaatattcatttattacaacacttctttcaatgctttgatttgatcagcaggactgtccgcgtcatagatgtagctaccagcaacaaacacattggcaccagcttctaaacagatccgagctgtttttggaacgattccaccatctacttcgatatcatagtgatacccatttttctctttcaattgtgctagttccttgattttagcaactgtttcttcgataaaagattgtccaccgaatccagggttcacagtcattaccaatacttgatcacacatggatagtacatgttgaatagcggctactggcgtaccagggttgataacaatttccgcctttacattttcatttaaaatcatttgaattgcgcgatgaatgtggggagtagcttcggcatgaactccaattatatcggcaccagcttcggcaaacgcatgaatataattttctggttgagtaatcatcaaatgaacatccagtggcaacttagttatcggacgaatagctttgacaacatttggtcctaaagtaatattaggaacaaattggccatccattacatctatatggatgtaatccgcgccgtttttttctacaagttcaatgtcccgttgcagattcgcaaaatccgcacttaaaattgatggtgctagtttaatcatattcgtttccctcacttatttttctttttataaattggacgacgattttcaatctcctctaaaaattgaacatagtttttataccgggtaagtgcaactgtttgctgttcaactgcttcttttacagcacaatttggctcatttaaatgcatacactcacgaaaacgacattggtgtgccaatgctaaaaattctggaaactgtttgggcaattgtccactatcgatttccaaaaaatcgattgagctgaatccaggggtatcagccactaacccatcatataatgtcaataattctacatgtcgcgttgtatgtttccctcgacctaatgactcagaaatttcggccgtttccaaatctagctctgggactattcggttaagcaatgtggattttcctgcgccagattgtcccataaaaactgtcagtcgttccgggaaaattctttgtaactccagaagatcgctattatctgcttttgaaacaatgacttggtaaccaatttgttggtacaaagcggcaattttttgaacctcactttgatcactcactaagtctgttttactcaaaaagataattggttcaatctctttatactccagtgtaactaaaaaccgatctaatagattaaatgagaaattaggctggatcaaacttgtcaccactacaccttgatccacattggccactggtggacgtatcaattcattttttctcggcagtatctctaacaagtatccatcagttggattactactttcaaaaataacttcatccccaacaagcggcgtgatttttctgtttctgaagtttcctcttgctcgagtttgaaagatagtatcttcagactctacataatagaatccactaagagctttgattatttgtcctttcaaaaattctcctcctcatttctttttattgtaacatatttataactcatgaataaatttctcaccaataaaaaaagcctgaagaagactcttcagacaaaaaatcgggaagacaggattcgaacctgcgaccccttggtcccaaaccaagtgctctaccaagctgagctacttcccgataatagatattaaaaaaataaaaagactacgcgcccaagaggagtcgaacccctaaccttttgatccgtagtcaaacactctatccaattgagctatgggcgcatattaagaaatgccgaggaccggaatcgaaccggtacggtgatcactcaccgcaggattttaagtcctgtgcgtctgccagttccgccaccccggctgattgcgatggcaaaagcggaaaacggggttcgaacccgcgacccccaccttggcaaggtggtgctctaccactgagctatttccgcgtattcctgatgccggctaaaggacttgaaccctcgaccctctgattacaaatcagatgctctaccaactgagctaagccggcaatgaagtgcgggtgaagggacttgaacccccacgcccgaaggcgctagatcctaaatctagtgcgtctgccaattccgccacacccgcataggttattactatgagccgtacagggctcgaacctgtgaccctctgattaaaagtcagatgctctaccaactgagctaacggctcatatgggggttaacgggttcgaaccgctgaccctctgcttgtaaggcagatgctctcccagctgagctaaacccccataatttaaaaaaaacgcgtggcgacgtcctactctcacaaagggaaacccttcactacaatcggcgctaagaagcttaacttctgtgttcggcatggttacaggtgtatccttctcgctatcgccaccacactattcaattgagtaagtattgctcactcaaaactggatcgaagaatcaaaactcttccgagtttccttgcttttttcaatcgtggttaagtcctcgatcgattagtatcagtccgctccaaccatcactggccttccacttctgacctatctacctgatcatctctcagggatcttactttcttaaagaaatgggaaatctcatcttgaggtgggcttcacacttagatgctttcagcgtttatcccttccctacatagctacccagcgatgcctctggcgagacaactggtacaccagcggtaagtccatcccggtcctctcgtactaaggacagctcctctcaaatttccaacgcccgcgacggatagggaccgaactgtctcacgacgttctgaacccagctcgcgtgccgctttaatgggcgaacagcccaacccttgggaccgactacagccccaggatgcgacgagccgacatcgaggtgccaaacctccccgtcgatgtggactcttgggggagataagcctgttatccccagggtagcttttatccgttgagcgatggcccttccatgcggaaccaccggatcactaagcccgactttcgtccctgctcgagttgtagctctcgcagtcaagctcccttctgcctttacactcttcgaatgatttccaaccattctgagggaacctttgggcgcctccgttaccttttaggaggcgaccgccccagtcaaactgcccatctgacactgtctcccagcccgataagggctgcgggttagagtggccataacgcaagggtagtatcccaccattgcctccatcgaaactggcgtcccgatctctacggctcctacctatcctgtacatgcggtacagacactcaatatcaaactacagtaaagctccatggggtctttccgtcctgtcgcgggtaacctgcatcttcacaggtactaaaatttcaccgagtctctcgttgagacagtgcccaaatcgttacgcctttcgtgcgggtcggaacttacccgacaaggaatttcgctaccttaggaccgttatagttacggccgccgtttactggggcttcaattcgtaccttcgcttacgctaagcactcctcttaaccttccagcaccgggcaggcgtcagcccctatacgtcatctttcgattttgcagagacctgtgtttttgataaacagtcgcttgggcctattcactgcggctgctcgttagagcagcaccccttctcccgaagttacggggtcattttgccgagttccttaacgagagttctctcgctcaccttaggatgctctcctcgactacctgtgtcggtttgcggtacgggccattgttttctcactagaagcttttcttggcagtgtgacatcagaagcttcggtactattatttccctcctcatcacagcttgtccttgaaagtagaagcatttgactcccactaagactcactgcttgaacagacatatccatcagtctgcacttcttagcctcctgcgtccctccattgctcaaacaaaaacaacgggtacaggaatatcaacctgttgtccatcgcctacgcctgtcggcctcggcttaggtcccgactaaccctgggcggacgagccttccccaggaaaccttagtcatacggtggacaggattctcacctgtctttcgctactcataccggcattctcacttctaagcgctccagtagtcctcacgatctaccttcaacgcccttagaacgctctcctaccaatgcaccttacggtgcactccacagcttcggtaaactatttagccccggtacattttcggcgcagggtcactcgactagtgagctattacgcactctttaaatggtggctgcttctaagccaacatcctagttgtctgtgcaaccccacatccttttccacttaatagttatttggggaccttagctggtggtctgggctgtttccctttcgactatggatcttatcactcacagtctgactcccggatatgaatgaatggcattcggagtttatctgaattcggtaacccgagatgggcccctagtccaaacagtgctctacctccatcattctcaattccgaggctagccctaaagctatttcggagagaaccagctatctccaagttcgtttggaatttctccgctacccacacctcatccccgcacttttcaacgtacgtgggttcggtcctccagtgcgttttaccgcaccttcaacctggacatgggtagatcacatggtttcgggtctacgacaacatactcattcgccctattcagactcgctttcgctgcggctccgtctcttcaacttaacctcgcatgctatcgtaactcgccggttcattctacaaaaggcacgctatcacccattaacgggctctaacttgttgtaggcacacggtttcaggatctatttcactccccttccggggtgcttttcacctttccctcacggtactggttcactatcggtcactagggagtatttagccttgggagatggtcctcccggattccgacggaattcctcgtgttccgccgtactcaggatcctcctaggtgtgagccagatttcatctacggggtttttaccctctttgacatacttttccaagtatttcgactatctgtttcaactaccatatcggagtcctacaaccccaacaagcaagcttgttggtttgggcttttcccgtttcgctcgccgctactcagggaatcgaattttctttctcttcctgcaggtacttagatgtttcagttctctgcgtctacctcacagctgctatgtattcacaactgtgtaacatcctataaaagatgctgggttcccccattcggaaatctctggatcatagcttacttacagctccccaaagcatatcggtgttagtcccgtccttcatcggctcctagtgccaaggcatccaccgtgcgcccttattcacttaacctttgaccttacggtcggtgagtacttcttctagcgatagaaggttgctcaagaaaataagcgttgaacttattaaaaaactctttaacttgtcaactcggtgtgtgttacttgttttgattttcttcgatatccagttttcaatgaacaaactattttgagagtaaacctctcaaaactgaacaaaggcaaacgatgtgtagtcttccgtactattccttagaaaggaggtgatccagccgcaccttccgatacggctaccttgttacgacttcaccccaatcatctatcccaccttaggcggctggctccaaaaaggttacctcaccgacttcgggtgttacaaactctcgtggtgtgacgggcggtgtgtacaaggcccgggaacgtattcaccgcggcgtgctgatccgcgattactagcgattccggcttcatgtaggcgagttgcagcctacaatccgaactgagagaagctttaagagattagcttagcctcgcgacttcgcaactcgttgtacttcccattgtagcacgtgtgtagcccaggtcataaggggcatgatgatttgacgtcatccccaccttcctccggtttgtcaccggcagtctcgctagagtgcccaactaaatgatggcaactaacaataagggttgcgctcgttgcgggacttaacccaacatctcacgacacgagctgacgacaaccatgcaccacctgtcactttgcccccgaaggggaagctctatctctagagtggtcaaaggatgtcaagacctggtaaggttcttcgcgttgcttcgaattaaaccacatgctccaccgcttgtgcgggcccccgtcaattcctttgagtttcaaccttgcggtcgtactccccaggcggagtgcttaatgcgtttgctgcagcactgaagggcggaaaccctccaacacttagcactcatcgtttacggcgtggactaccagggtatctaatcctgttcgctccccacgctttcgagcctcagcgtcagttacagaccagagagccgccttcgccactggtgttcctccatatatctacgcatttcaccgctacacatggaattccactctcctcttctgcactcaagtctcccagtttccaatgaccctccccggttgagccgggggctttcacatcagacttaagaaaccgcctgcgctcgctttacgcccaataaatccggacaacgcttgccacctacgtattaccgcggctgctggcacgtagttagccgtggctttctggttagataccgtcaagggatgaacgttctactctcatccttgttcttctctaacaacagagttttacgatccgaaaaccttcttcactcacgcggcgttgctcggtcagactttcgtccattgccgaagattccctactgctgcctcccgtaggagtctgggccgtgtctcagtcccagtgtggccgatcaccctctcaggtcggctatgcatcgtggccttggtgagccgttacctcaccaactagctaatgcaccgcgggtccatccatcagtgacgcaaaagcgcctttcaactttcttccatgcggaaaatagtgttatacggtattagcacctgtttccaagtgttatccccttctgatgggcaggttacccacgtgttactcacccgttcgccactctttttctttcggtggagcaagctccggtgaaagaaaaagcgttcgacttgcatgtattaggcacgccgccagcgttcgtcctgagccaggatcaaactctcataatgatttgtttgaacgatccataggatcgttaagctcaaataaaattaactttgctagctattgcttgcatgtattttgcttcatataatgaagcgccctacacattggttcgtttgcttgctttgttcagttttcaaaggtctactgcgctgcgttagcaacttttaaatcatatcagaccgacaagtgaatgtcaactcttttttaaaagtttttttcgaaagtgtttattcaacaacttcctgtgcgtcatcagcgactccattagaataacaaatgaattgttatttgtcaacaattttttccaatcttttttgttgctgcatcagcatcaaattgattttttaaatttgcgacttcgttataatatcatctgttggttctggcgtcaacaacttttttcattttcttttagaaatgatttttgtcatttggcacatgtaataatatagcaactatcttgccattcgtcaacagtaaaatcattgatatttcaacgtttctaaatactgcggttccatcatatattttagttaattctatggaataatctctccatttggaaactatgatgattatttgaattctcaatgttcggtttttattcttgttgtaagtattatttcctatcattcttataaatttaagtatgattttatcaatttcctagaatatttgctaaaataggagaaaagaatattgttcctaggaggatttatatgaaaatacttgttgctgatgatgataaagagattgttgaactattaagtatctatcttcataatgaaggttatgaagccgtcaaagcttatgatggtaaagaagctttaacaaaaattagaactactccagatattgaattactgatattggatatcatgatgcctgaaatggatggcatgcaggttgtaaaagagttgcgaaaagaatcacaaattccaatcatcatgctaactgctaagactactgatatggataaaatacgaggtctagttgctggtgcagacgactatgtaacaaaaccattcaatcctttggaagtgatggctcgcgtcaagtctctgctccgtcgaacaaaaatgcaagctccctctaatcagccagatatcttagaagttagctcattgatcattaatcgtgattctcatgaagtaaaaacaatcaccggaaatgagatccaattgaccgctcttgaatttggtattctctacctattagcatcccatccgaatcgtgtatttagtgctgatgaaatttttgagcgtgtgtggaagcaagagagtgtcgtgtcagccaaaaccgtaatggttcatgtgagtcatctgcgtgataagatagaagaagcaactgatggcgagaaagtcattcaaacagtgtggggagttggctataaaatagatgcgaagtaatccaatagaaaaaaagaaacgtatcaccctcacttctaaagaaatcagtgaattatttgcagaaggaatcgttactgtaatccttttacttctattaaatgtcgcgattttagtcatcttgacttctataagagagaattcaccgttgttagtggaggcgatctatgagtcaaaaaacgcttttacttctgcttttgacacggatatttttcaaagtggccgcaatttcattatccctttgttctttttattagatgtgattgttttatattggcgtttgattcgtcgataccgtcaaatgcagctacggcatattattagtgagcttcattatattgcagagggaaactatgatcatcgtattccatttgaactgcgtggtgacctcaatcggattgtttcaaatattaacggcttggtagatagtaccgtcgccgccattgaagatgaacgaaggattgaacagtcgaaggatgaattaattacaaatgttagtcacgatatccgaacccctttaacttctattattggttatctaggcctgattgaagatcgtcagtatcattctgaagaagagttattgaaatatactcataccgcttatgtcaaagcaaagcaaatgaaatctttagtagacgatcttttcgaatacacaaaagtaagacagcctagcgtcccaataaatgtcatttcttttgatatggcgcaattagtcgaacaactagctgcagattttgaattagaagcatctcgtaaaggaataaagattgagactcacactcgcccagagcacattattatggacggtgatactgagaagcttgtacgagttttcaataatttattgtctaatgctttaaagtatggaaaaggcgctgacaaaatcgtaatggaagtggaaaaagtaggaacagaagccattctaacagttaagaacaatggacaaatgattcccaaacattcattagactccttatttgaccgcttctatcgagtggaggaatcacgttcgcaggaaactgggggaactggacttggtcttgccattgctcaaagcatcgttgccttgcatggtggctacatttttgcaaaatctactccggattggacctcctttattatccatctcccattaaagagaaatgatttatcaaatacccaaaactatggttgacgaactaacgctttttcgctattctagagaaaatacttactaataaagcatagaacctagtacattttttactttttcagagaactgatggttggtgagaatcagtaatggaaagaatggaatccagttcattaaaagtgtatcttttgaaagaaagatcgtgtgcccacgttacgggcaacaagggcagcgttatgctgaactcgggtggtaccgcgaaagatcttttcgtcccaagaatagggatgaaaaggtctttttttatatgaaaaacaagggggaagaattatgttagatattaaaatgattcggcaaaattttgacaaagtccaaacaaaattacagactcgcggagtaaaaaaagaagtattagaagaattcttaaagttagatgaaaggagacgacaactcctagtagagacagaagaattaaaaaaagttcgaaatgaagtttctgcagaaatagctcaactaaaacgagcaaaaaaagcagcagatgataaaattactgagatgaaagaagtcggtactaaaatcaagtctcttgatgacgagattgcaaaaattgattcagaaatcaaattgatcgcaacgacattacctaatctgcctcatgactctgtcccagttggaaaagatgaagatgacaatgttgaagtaagacgctgggctacaccaaaagaatttgatttcgaagcaaagcctcattgggatattgccgaaaacctaggaatattagattttgaacgaggtgcaaaggtagccggtagccggtttgtctactataaaggattaggtgcccgtcttgaacgagctttatataactttatgctagaccaacatgtttatgaacatgggtacactgagatgattactccatatattgttaatagcgatgcaatgtttggaactggacagtttcctaaattcaaagaagatgttttccaattagcggaaacagatcttaccttgattcctactgctgaggttcctttaacgaattattataatggagaaatattggatcttgaccaactaccggtttacttcacagcattaagtccttctttccgctcagaagctggaagtgctggtcgtgatactcgcggattaattcgattacatcaattcaacaaagttgaaatggtcaaactaagtgaagcagcacactcttatgaagaattagaaaaaatgactgcaaatgcagaagacattttacaaaaattacaacttccttatcgagtaatggcattgtctacaggtgacatgggcttctctgctgctaaaacgtatgatttggaagtatggattccagcacaagaaacatatcgagaaatcagttcatgttctaattgtgaagattttcaagcacgtcgagcaatgatccgttatagagataacgatggcaagattcattacatgcatacattaaatggttcaggactagcagtcggtagaactgttgctgccgtattagaaaactatcaaaatgaagatggtagtgtgactataccagaagtactagttccttatatgggtggagttacccgaattgaaaaaaattgaagaacaaggtaggatgagaattcctaccttttttctttaaatattctaagaaatacccccctattgttgaaactatattacagttatgttacgtttattttactttatgatgataaatggagggataaagtcatatgtctgacaaaaatacctatgcacgtcgtagccaacgtcacaaacaagaacctgatacctgtgaaaatacaaatcaattgaatgaagctgtaaagcccaaaaccggaaacgaaaacaaacaacaaaaaataccgaagaaaaaatctaattatagcaagtatatattcgcattgtttaccgcacttattctagtaattgtcgctactggcggctatattgtttatacattaaaacagcaagaagcagaagctcaagccaaatatgaaactgctgcaaaaaatctcatggcttcaatccaagaagagcaagaccaaagtggaatttcaacgaaaatagatactataaatgacggagaaaataagtgccttgtttaccgtccagttgatgaaaatactgttcctttcaaaaatgcaaaccagctcttagacgagcttgctcaaaagcaacaaaaaaagcatcgtgaaaaagaagtgcttacagttgccagaataaaagcaacagcaatatcttctaaaattggtcagtatagaattgaagcagatagttttatctgggatcgcagtaaggaaaattttaaaaagccagacagtatttctgagaaagccatttatgtttccgaaaaaactggcaaagaaatcacaaataaggatttgattccagatgaaggaagtctcttaggtattcaacaggtgattcagcaatccatacttgatcaagccaaagaacctgaaaaaatcattgatgctgtattaacaatggatagaatttcttatgatagtaaaatgacttatacacctgatgaattgactatcgtcttaccaaaaaattcaactggaacttctaaagtcactctaaaatacaaagatattgctccattcattgatacagatctggtttcgcaagaaagtataaaagatacattacctgcattagatgaaaataaaaagtacgtcgctcttacttttgatgatggtccaaataatagctcaacacttgatttgttgaatatactaaaaacagataacgtgaaagctacttttttcatgttaggacagatggtggatcaaaatccagatgttgcaaaacaagtccacgacgagggtcatgaggtagcaagtcactcgtattctcatccacaattgaatacactttcgacagatgaattacaaagggaaataaataaaaccaacaaagctattttcaaggctacaggcgtcttgcctcgcaatatccgtcccccttatggcgctattgataaaaaaagtgctgaaacaattggcatgccaattattcaatgggatattgactcacaggattggaaatcaaaaaatcctggaacaatcaataatgttgttaaacagaatgtctttaatggcgcaatcatcttaatccacgatatccatcctgaatcagtcaaagctgtaccaggattgatctctatgttaaaacatgaaggatacgaatttgtgacgatcgatcaactattgtcaggaaaacaaaaaccattgcatcaatattttggtatgaatgatgaacgactagtagaataaaagaaaagcgaacgtattggcgttcgcttttcttttattcataaacatttgtagtaaatatttgaataagtaaatgagaaactgctttaggctgcatctcagaaaaatcttttagccagcgttcaatcaacccgatcgagccacagacaaaataactcaaacataactctagttcttctcttgttgcatcttcgaaataaatagtaaagcgtttaaacgtttccggtctgattttttccaataacaaatctaataaatgactgttattaagcagaatcaaatgacttacactaggattttcttgcagtataagtaataatttttctagccatagatctaatgggagattttcttgttgcaaattatctgcaatttgttcaacgatttctttctcaatctcctctaaaaggtctgcagtatctttgtaatacttataaaaagttcctcgattgatatcagcacgctgggcaatctctgtaattgtgattttttcaaattctttttccatcaaaatctcttgaaatgcttttcgaatcactttttttgtatattgtgttcggcgatttccaactattcctaccataacttcaatcctttctatacaaaaataacttaaatgtttatttaataacagatgaataagatttgaggattgcccctttttttctttcttagtatactaacgctatgtgattaaatcaacaggtgttcaaaatatggaggcgttatatgagttatgtagaagtaaaaaatacgtataaaagatataaaatgggcgaaaccacgattaccgctaatgaagacctatccttttcaattgaagaaggagaactagtcgttattttaggtccaagcggagctggaaaatcgactattctaaatatattaggtgggatggattcacctgatgaaggtcaaatcattatcgataatattgatattgcacaattttcggataaacaacttacagaatatcggcgcaaagatgtaggcttcgtttttcaattttataatttagtcccaaatctaacagcaaaagaaaatatcgagttagcaacagagatatcaccgaacgcacttgacccagatgctgtgcttaagcaagtaggattagaaaataggtccaataactttccttctcaattatcaggtggcgaacagcaacgagtgtccattgcccgagcgctagcaaaaaatccgaaattacttctttgtgacgaaccaacaggagcattagattttgaaaccggtaaacaagtattgaagctgttgcaaagcgcaagtcgtcaagctggaaatactgttttaatcattacgcacaacagtgccatttctcccattgctgatcgcgtgattcgtattaatgatgctacagtgcgctctgtagaaattaatgaatcccctatttcaatcgatgagatcgtttggtaggaggaaacaaatgaaaaataagacgtatttaaaagcaagcttacgagaaatcaaacagtctaaaggaagatttatcgctattgttttaatcatctttctaggtacttttttgtatgtaggtgtcaaagcaactgggcctattttgaatcattctgcaagtacttatgttgatgaacataacttagctgatatacaggttacatcaacactaggtatcaccgatcaagatcttaaagtagctaaagagtcagggattcaagtggaatcaggctaccaattttattatgtagcagaagcagatgaagttgtccaaatcaattcttacaacaaaagccaaaaacaaaacgcattaatccttgaagaaggccatttaccaaagaatagcaatgaaattgtcttagatacacaagcgaaagaatatggctatcagttaaacgatacttatactatcgactcgcaggatactataaaggataaaaacttcaaaatcgttggttttgccaactcgcccctatttatcagtaaagctgaacgaggctatgcgaatgttggcagtggtacagtaacatattttgcttaccttcccgaaaatcaatttctgagtgatgtccaatcggtgctctatctgtcttttgataatgtgaaagatttagaaacttactctgattcctatcaagaaaaaatggaaaagaatcaagaaaaagtagaaacgctttttgctgatcgtccacaagaacgtgtagcagaaatcaaacatgacgcaatggaagaattgaaacctgctaaggaaaaaattgaaactggaaaagcacagctattagatgcacaaacagaattagatgctgctaaagctcagattgaacaacaaaaaagtgcaacccttctgttaccgtctcaacaacaagctggtgctattgaacaactgaaaactgctgaatcgacattgattaaacaacaaaatcaaatcaatgaagaaaaagagaagttagctgatgcagaatctacattacaaaaaaaagaaaatgaaataaatgaaatggaagagcctacttatttatttaatctaagaaaagataatcctgggtttcaagaatacggcggtttatctgatcgtatagcggcaattgcaaatgtctttccagtattcttcttttttgtagcagctttaataacttttaccaccatgactagaatggtagaagaaaatcgaaaagaaattggcacattaaaggctttgggatatgcaaaaagagagatagctcgaaaatatatcatctatgctcttttatcatctagtataggaattctcttaggagctgtactaggtatcgaatttctacctcgattaatctattttctttctagtgaacggtatcttttaggtggtgtccgggtttactatgtttgggggccaatcattcaagctacagtcgcctttattcttgctactttaggtgcagcccttgttgtcctctatcgtgatttgcgagaaaaaccagcgcaactattgcaggcacgtgcaccaaagccagggaaaagaatttttctagaatacattcaaccactttggtcacgcttgagctttaatcaaaaaatcagttaccgaaacatttttcgctataaatcacgaatgattatggcaataattgggatcgcaggatgtgcaggacttatggtcgctggagtgggtctaaaagattcattaagtgctgtttcgcaaaaacaatttggtcctatcactgattatcaagcaatcgtcacattaaaagatagtaaaacaaacaataccgaagtttttgaaatattagaagaagatccaacaattcaacaatccctgcttgtattgaatgaaacaattgagttacggtccaaagaacaaggaaagcaaagtctgtctttagtggtaccttctaatactgactcattctcgaactatatgcatctacactctaccgatggaaaaaaaatgtcactagatgatggggccatcctaacgatgaaatatgcggagctttttgatatccacattggagatgagctaaccttttatgataaggatcaaacagctgtaacagtgaagatagctggtatcgctgaaaattatttaggtaactcactttatctttctagaaatgactatgaaaaagcaacaaatacgaactatcagcctacatcgcttcttatcaagagtaaaaagatggaacaaaagcaagaagacgcattagctaaagaactattgaaaacagaccaagttcagaatactaccttcctgtctagtcaaatcaaagcgcaaaatgagtccatggggaatctgaattccattgttcttatcttggtcattttatctggcgccttggcatttgttgttctatacaatttaacaaacattaatgtatcggaaaggattcgggaactctctacaattaaagttttaggtttttacgacaaagaagttacaatgtatattgttcgtgagaatgttgtctttactttgctagggatcctagctggttatggagtcggatacttactgactgattttattctccgacaggcatcgatggaaaacatggtttttccattagtgattagttgggctgcttatgcgttagccggcggcatgaccattttatttacaatcattgttatgttggttactcattataaattgaagcatgttgatatgatcgacgcattgaaatcaaatgaataattttcccatacaaaaaatggcggtcagtgtcttattaagactactggccgccattttttatttaatgttttcacgtgaaacaatttctaagacttcacagaatagtttggtgcttctttagtaatttgcacatcgtgagggtgagattctttcaaaccatttccgctcatttggataaactgtgcttcatctcttagttgttttaagttcgctgctccaacatatcccatccctgattttagaccgccgatcatttggaataaaatatctgcaacactgcctttataagccactcggccttcaattccttctggaacaagtttatttgcttcattaactccaccttggaaataacgatcacttgaacctttttccatagctcctagtgaccccattccccgataggttttgaaacgtcgaccttgataaatttcaaattcccctggagattcatccgttcctgccaacatacttcctagcataactgcatgtccgccagcagccaaagctttgacaatatcaccagaatatttgataccaccatctgcaataatggcttttccatattgtcgagccactgaggcagcatcataaatagccgttaactgagggacacctacaccagcgacaacacgtgtcgtacagatggaaccaggaccaataccaactttaacgacatctacaccagcgtcgtatagagcttttgttccctcagcagttgcgacattccctgcaattaatgttgcttcaggaaaatgtgctctgatttcagaaattttacgcagtacgcctgcactatgtccatgagcagtatcgattacgatcgcatctgctccagcatctaacaatgcttgtgctctttcaaaggtatcactggtcacacctacagctgccgctactaataaacggccatgagtgtctttagccgcgttggggaattcaatgactttttcaatatctttgatcgtaatcaatccacttaaaataccttcatcatcaacgatcggtaatttttcgatcttatgtttttgcaagattttctctgcatctttcaaagaagtaccaaccggtgccgtaactaatttttctttggtcattacatcagaaattgcgattgaataatccgtaacaaaacgcatatctcgattcgtgatgattccaactagttcacgattctccattgtttcaacaatagggacaccgctgattcggtatttactcataaggtgttctgcatctgctactagatgactaggtgttaagaagaacggatcaatgattacgccactttcagaacgttttactttccgcacttcatctgcttgggcagcaatactcatatttttatgaatgacccctaatccaccttgacgagccattgatattgccattttactatcagttactgtatccatactggcactcatgatcggtatatttaacgtaatattttttgcaagctgcacatgcatatccacatcatttggcaacacatgactttctgcaggtatcaataatacatcatcaaacgttaaccctttttttacaaatttggtttcccagttggacatttttgtaaccactccttaaagttaatatgtatttttaaaaaaatagcaaatattttttcataagtcaactattcggaaagctttcttatttattcctgtgtaatctgagaaaacagccagaatcacaaaagatttctattttctccctcttgtatgacacataataaaaaagacccacacgcatgaatgacatgtgggaacttattattatcctctaggaacagataagctactaataatattgtatttcttcttcaagtaatatttagctgctagtgccacagccccaatcacaatttcgattaatgggtcgacctgtggattaagtggtggttgaagcatagcagaaagtgagatagtcacgatccatactaagaaagctccaactaaaatcaaaataattttccacattttcggacgtttacttttatctgcgcctggacgttcatattgatacatgtacttgtacattaagtagaagacccaaccagctaacatggccattaagaagagggtcaacaatccgtaaggctgtgcttgaccttttgtaaatacccccatcacgccgagcattaatccaaaaatacctaaaataagcaacgtattgtctaaccacatcaagaatggacctgattctttttgttcaactggcttcgtgatgattgcttccgtacgttcagagactgtcccaaaaagttgtctagcggttttaccacctttttgttcttgaacaagaatcggtaacatctcatgtaatgcgacagttttttcttcttcagaaagattagctgcctccaaagatttttttaaatcaaaaatatattgttggttacgttttgttagttgtttttctaattcacgattttcggaaacatacgagcgcagagtttctggttccataaatcatttctcccttctgcgtgatttcttcacaaaggacattttaccatatttttttttggaagaaagccttttatacattaaaacggaataacataacatcgccgtcttgaacgacgtattcttttccttctaaacgaacacgcccagcttcttttgctgcatgcatattgccatacttatccaaatcttcaaaggaaacagtttctgcacggataaaccctcgctcgaaatctgtatgaataattcctgcagcttgaggcgctttgattccttttcggaaagtccatgcacgaacctcttgttccccagctgtaaagtaagtggctaatcctaataaatcataggccgcacgaatcagttgatctaaaccagattcttcaatgcctaaagcttccaaaaattctgctttatcttcatcatccaattcagcgatttcttcttctgctcgagcactaatgacgatcacttccgcatgttcactctcggcaaattctttcacacttttaacatagggattctcttctgcatttgccacatcatcttctgcaacgtttgctacatatagaacaggttttgttgtcagcaaaaacaatcctctaacgattttttgttcttcttcagtaaattcaatagaacgtgcggatagaccttcttctaaaacaggtttaattttatctaaaactgctaattcagctacagcatctttatcttttgttttcgcaactttagcaacacgtgcataacgtttattgatagattctaaatcagccaagactaattctaaattaatagtatcgatatccgctagtggatctacccgtccttcaacgtgtgtaatattgtcatcatcaaaacaacggactacatgacaaatagcatctacctgacggatatgacttagaaattgatttcctagtccttctcctttactagctccgcgaacgattcctgcgatatccgtaaattcaaatgttgtcggtacagttttttttggatgtactaattccgtcaaacgttgtaaacgccaatcagggacttccaccatccctacatttggatcgatcgtagcaaaaggatagtttgctgcttccgctccagctttcgttatagcattaaataaagtagatttacctacattaggtagtccaacgattccagcagttaaagccatttattatttcactctttctcttttttttctaggatttttttcatttttttgtcgaactcacggcgagtaagcataacaatatggccacagttcgtacattttattttgatgtccgcacccatacggataatttcccaacggtttgctttacatgcatggggtttcttcatttcaacaatgtcaccaagatcatacatatttatcacctcaagcttcatcaaattgaatgttcaataaatcaaggattcgtgttaaatctttctgtgaaaggtactcaatctctattttccccttaccttccttttcatggatttcaacatttgtcccaaacttgtccattagtcgttcttcactttcccgcaaataatagggtttttcacgaatcaaacgaggaattttcttcttctcatttttagcatcattcatttcagacactaattgttctaattggcgaacagtaagattttctttcacacatcgattggctaattttaaaatcagatctttgttttttaaccctagcagtgtgcgcgcctgtcccattgataagcgttcatcttgtaccatctcttttaccaactttggcaatgataatagacgaagataatttgcaatataaggacgacttttgcctaatcgtgttgccacttctgcttgtgttaatttaagatttttcatcagcatttcatacgcttcagcttcttctaaaggatttaaatcttctctttgcagattctctagaacagctacttgcatcattgcttcttcatcaaaatcacggataattgcaggtatcgtttctttttttgctaacttggatgcacgaaaacgtcgttcaccagcaatgatttcatagccctttacagtagattttctaacaataatcggctgaaaaacacccgcgtgttgaattgaattagctagttcttgaagtgagacttcatcgaaggttttacgtggctggtaagggtttggtcttaattcatttaaagggagctcaaccacttcctctgttttgatatctacttcttctaagccttgaagatcttgaaatagtgcatcgatcccccgtcctaaacctttccctttatttttcacgagtcaacacttcctttgctaatgtctgatatacttcagcaccctttgaacgtggatcataatcaataatagatagaccatgacttggggcttctgataagcgtacattacgtggaataattgtctcataaactttttcttggaaataacgacgaacttcttctactacttcagcacctagatttgtccgtgcatcgtacattgtcaacaaaacaccttcaatttctaattcaggattaaagtgcttttgaactagacgcacggtattcaataactgacttagtccttccaatgcgtaatattcacattgaacgggtattaaaatagagtcgctggctgtaaatgcgttgatcgtcaaatgtccaagagagggggggcaatcaataaatatatagtcatattgatctttgatttcattcaatgccgatttcaaacgagattcccgagccatcattgaagttaattcaatttcagcaccagctaattgaatcgtcgcaggaacaatatctaaattctcacgactacttggcaatattgcctctacgattggtgtttcattcaccaatacatcgtagatatctttatcaacatctggtttacgaattcctactccacttgtggcgtttccttgagcatcaatatctactagtaagactttttttcctacataagccaaacaagcacccaggttgactgtagttgttgttttgcctacgccgcctttttgatttgccaccgaaataatacgtgccattctgcttcctcctacttgattggttgtttcgccggcaaaccaggtttgcgcgggtatttttttggcgtttctttcgtttttttgatgatcaaaagatgccgttcatcattactaacaggcaatgtcaattttttttcttcaataaacttaccaccaagtaatgcgattgctgattttgcttctattaattcttcttcgctttttgctgcttttaaggcaaagaaatacccgttctttttaacgagaggcaagcatagttccgttaaaatatttaaacgagctactgctcgagcagtgacataatcaaaggattctcggaactctttttgaccaaatgtttctgctcgatcgtgaaacaagtaaacatcttttaaacctaaatctgccactaaagtttgtagaaaagtaatccgtttattcagtgaatcaacgattgttatctttagttgtgggaagatgattttcaatggaatactaggaaaacctgctccagaaccgacatcacataaatgtgcatcttctttgaatgctgtcacaaaagctaaagaaatcgaatcataaaagtgtttcaaatatacttctttttgatcggtaattgcagtgaggttcattttttgattccattcaatcaaccgatcatagtaagtagcaaattgcttgagctgttcagatgacaactcaattccttgaatagataattgtttttgaaattcttctggcagcataatgaatcctttctatttttgtgaaacagaaaaatgtttcacagactaattcctactttaacgcaaaaagttttgagatgcaataggaatacattgctttcaaagagattttaatttttccacgacggtttttatttaattgtttgtggttagtttatggcaaaaatttgaacttgtactcagacaaaaaaatgcatcattttccatgaccggtaaatactaactcactagacttaaaaaatacaattacaaaattgtatctgtattctgatgaaattgttacttgtatgaatagtcagtaagcagctgtaaaagtgtattatcagttctatcaattttttagttaaataatatagaaagaatctgtttttcaaaaaaattgatcgataaaataagagctacccttcaacatgaaggatagctcttattttttctattattaattaatgaacgcgaggttcattattttcttgcatacgatcagatgttcgttctactgcacctttagctttttctgtttgtcgagaagcaaaatctcctgtttttgatgccgcgttggagactttatcttgaactgtctcgctatcttcttgatactcagcttctgacttaatgtcgaccacattgatattgacttcaattacatctagttgagtcatattggctacttctctatgaatcacttctttaactctctccgcaacttctggaatatttcgtccgtactctaccacaatatccatatcaacagcgacttgttttttgccaacttcagtattgatcccagaggttacattatctgtatttactaatttctctgcaatatttgagaaaaaccctccatcaactgttaacagaccatcaacatcttccagagcgataccaataattttttgaataactttatcatcataggtcaaagaaccatttacggatgtttctccagtaggaccttgaaatccactaggtttttctgtctgattatgatgttggtttccaactgttgcttggtgctgttcaaccgcttcttgcgcatgaggtacaactgggtctggtgcttctgtcatcggaatatcgttttcttttgtcgtatgatccgtgtttggtacgactggatctggatgtgcacttactggtttttcattttttaattcgtttttttcgttattcatttaaattcctcctgagttcttattgttttagaaattgatctaacattcccgttctctgtacgtacatccctagggcaaagcctaatcctgtgagcataatgatcagtagtgttttgaaaaagccaatgctgacaaatagtaaagctaacactaatccaatcgctccaaagataatagggatcttatattgttcaagctctttcattgatagacctcctattctacacgtggattttctgtagtgttctgttcttcgtagttcgtataagaaacatcgactttgactttttcacttgatcctaacgttctctgcaaatcttgctggatctcagtcatcaaattctctgttttacctaccaatgcagaagtacgttttaatcttcctttgatttttacgctgattcgatttttagttgctttaacattcactttaggtccatcaacaaattctttttcactaacctttgttcgtactaaaccttcaattgcttttttatcaatcgacaatgttcctttatcctctttcaaaacaaaagtagcttttgttctaggatagaagataataactagaatgaaacaaaggaaaaagataattagaactgctgctgcccaaaaaagatattgttgtaggaaataattcgtgaaaaagaaggaaataaatctttcttttcgatctaagccaaacggtaaactaaaataaggattgcccaataataatattggcaataacacagtaataaaaatcaatgaaactacaatcgctaaagttttccatcctttattcataagacacctcctaatatttgatcacttcttatagattgattgcttctccaccagttactccataaatttgagctgttacatagcttgctttgttcgacgccagaaaaacatacacaggtgctaactcggctggttgtcctgcacgttgtaacaacgaattttggccaaattcaggtaactgatcctgaggttgtccatgatccaactgtagaggtgtccaaattgggcctggtgctacaccgtttactctaattcccttttcagcaaactgttttgccaaactaactgtgaaactagcaatagcagccttagttgcagcataatccattaaatgagcacttggactaaaagcttgaacagaagtcgttgtcacaatggccccacctgctgggagatgaggttctgcagctttaactaaagcaaacatggataatatattcaccatgaacgtatcttttacttgctcaaagggtaattctgaaatagagggacgtgtgatttgttgcgcagcgttcaaaacaagcgtatccaaaccgcctagcccttttactgctttttcaacgatttcttgaggagctgcttcatctctcagatcatatggtaataggatagctttacgtccagcttgttcgatatagtgagcaacttcctcggcatctttttcttctcctggaaaaaaatgtaaggcgatatcggccccttctcgtgcaaaagcaatggctgccgctcgaccaattcctgaatctccacccgtaatcagtacccgtcgattttctaattgatttgttccttcatatgtttcttctccacaatccggctcaggcatcatttcttcttgcaaagcaggagtatcttgatcctgttttttaaatttacctgtttgataaagttcgcgcggatcattcaaaataggttcactcatcttacatcctccttttgtctataacaaaattctaaaccattaaatttttttttggaaatataacgcttatttaattttaaaatcaaaaataatttcaataaaaaatgagcaaagaaagcgtacacaaaaagggttttaataaggatatagaaggtaaaataatttatttctctttccgtactgaaattcaattttttccatattttggcaaaagtaggtaaactaaaagaaaaaagggggagtacaaaatgccttggaatatgaaagattatcctgcttcaatgaaaaacttggatccgttggttcgaaaaaaagcaattgatattgcaaatgctttgttgaatgatggctatacagacgatcgggcaattcctattgctactagccaagcggaaaaatggctagaaaatgccagtgaagaagaaaagaaagaatttcgtaaggaaaaaaatcctcaaaaagatgatccgcataccaaaaataaaaatgcaaaaaaacttctgacagccaatgttcaagtaaaatttgaagaagataaatggattgttttatctgaaggcgctaaacgagctagtgatcattttaatattaaagaagatgccattgctcgggcaaaagaaatcgctgaaaataaaaaaactggtgtagaagtatttaaaaaagacggtagtcaccaaaaagattacgacttttccgaataaaaaaaccagcctctttaggctggttctgttattttcgcaatcttcccttgttcgatgtagaccatcaatatacttatgtcggctggatttacgccactaattcggctggcctgagcgatggtttctggttgtattttttgtagtttttgttttgcttcagttgcaagaccattgattgcttcataatcaatgttttcaggaatccgttttgcttccatgcgttttagtttttctactttttcaagggcttttttgatatatccttcatatttgatctgaatctctacttgctcaatttccttcggctttaatgcagggtttgcttcgataaactgcaagagttcttgataatttacttctggacggcgtagaaattcatttgctagaacaccatcttttaatggagcggttcctttctctttgaggaaagtttgaacagatggtgttggtttgatacgtactttttttagacgttggatttcctcttctacagctgttttttttgttagataggcttggtattgtggctcttccactaagccaatttggtgtccgacttctgttagacgaagatccgcattatcgtgacgcagcaacaaccgatattctgctctcgatgtcaatagacggtatggctcattagtcccttttgttactagatcatcgatcattactccgatgtatccatcactacgtttcataataaaaggctcttttccttgaatcttaagagcagcatttatgccagcaatcaatccttgacccgctgcttcttcatatccgctcgttccatttgtttgtcctgctgtaaaaaggttagcgatgacttttgtttctaacgttggtcgtaactgatgtggtactacaacatcatattcaatagcataacccgtacgcatcatctcaactttttcaagcccggcaatcgaatggagcatattgacttggacgtcttctggaagagaagttgaaagtccttggacatacacttcttcggtatctaaaccttctggctctaaaaataattggtggcgtgatttatcggcaaaacgtacgattttgtcctcgatcgaagggcagtaccttgctccaaccccttcaacgattccagtaaacattggtgcacgatgaatattatcattaatgatttgatgtgtatgttcattggtataggttaaccagcaaggttcttgattggttttgtattggctatctggtgtactgtaactaaagtgattaggggcttcatcaccgggttggatctcagttacatcatagttgatggtacttgacttcacacgtggcggcgtaccagttttgaagcgcgcaatttctaaacctaactcttttaaatgatcagcaagtccaatggatggttgagaattattaggtcccgaagaatattttagttcaccaataataatttccccacgtagcgcagttccagcagtaatgatcaccgattttgcttggtaacgagctccagttgcagtaacaacgcctttacaaataccatcctcaacaatcaatttctctacaataccctggcgtaatgtcaaattttgctccatttcaatggtttttttcatttcagaagcataggcatgtttatctgcttgtgcacgcaatgcacgcacagccggtcctttacctgtattcaacattctcatttgaatgtatgttttgtcgatgttcttccccatctcgcccccgagagcatcaatctctctaacaactacacctttagcaggacctcctactgatggattacaaggcataaatgcaaccatatctaaattgatggttaacaataatgttttacaccccatacggctagctgcaagagcagcctctgatccagcatgacctgcaccaactactatgacttcatattcttctgcttgatattcttgcatcgtattctcctttggtaattttattttcctaaacaaaattgactaaataactgcgtaattaattcatcttgaacactatctccaacaatttcgcctaaataatcccagcaacgagtcatgtcgatttgcacaagatcaacaggcatcccactttcaattccttgaatcacttctgctaatgaatgttctgctttttccaataatgcaatatgacgagtgtttgagagataagaagcatctttgtctcctgtatttccaccaaaaaacaagtcagctattgcttgttcaagttgatccaatccttcactcgttaataccgaaataggaagagcaggctcattctctaaatagggcactaaatcttcttgattgattcttgaaggtaaatctgttttatttagcaaaatgattcgtttatttccagatgtaatatccaataattgtttatcttctgtcgtgagtgactcactttgatttagtactaataaaatcaaatccgcttcactgagtgctttgcgactacgttcaacaccaattttctcaacgatatcttctgtttcacgaattcctgcggtatcaactaactttaaaggcacaccacgtacgtttacatactcttcaataacatctctagtagtacctgcaatatctgttacaattgctttctcttcccgtaataagtgatttagcagacttgacttgcctacgtttggccgaccaataattgctgtactgagaccttctcgtaaaatttttccttgctgtgctgtctgtaaaagagcttgtatctgtttctggacttgatttgccttttctaataataaacgtgttgtcaattcttcgacatcatcatattctggataatcgatatttacttctacctgtgccaatgtctctaagatctcttgccgtagttgtcggatcaatcttgagaggttaccatctaattggttgatagcgagattcattgctttatcagtttttgcacgaatcaaatccatcactgcttcagcttgagataaatcaacacgcccattaagaaaagcacgctttgtaaactctcccggttcagccaaccgtgctccttgacgcaaaactaattgcaaaatttgattaacgacaacaatcccgccgtgacaattgatttctactatatcttctctagtaaaagtttttggttttctcatgatcgataccataacttcatccatcatttgatacttctcagggtcaaaaatatggccataatgtatcgtgtggctactcacatctattagttttttctttcctgattgaaagacagcatctgctatggaaattgcttgttcaccacttaatcgaacaatactgatcgctccttcaccagggggcgtagatattgctgcaatcgtatcaaattcctgcgtaatactcaccatactaaagctcctcctaatttttcgcataaaaaaagcgcccactccacccgtcaaactcataacggatagacttagcactttgactgcttgtcatataaaattctgggaatagattagcatactttttattttgtcgcaagtctacttggtaaacttttaatcttttgcatcaaacactaaaaacatttaaaataaaggaaacaataagaaatgagggatttttatggatacgtccaaaaaaatagatacttcttctcgcatcaaggaaatcattctttctaccggaaatgtcaatcggccatacattgttcgcgatattgtctttgccgcagataaaattgaagtagatttatttgatcctgaaatcgatttgaatgcgcttctctctgatgttgcttttcgtctgaaagaaaaagcgcacagttatggtgctaatgctgtaatcaactgccattttgaacatgatcggatcgtagaaaacgggaaaacttttttagaaatttttgcttatggaacagttgtacagtttacacaatctacaatcggcggctaatttccctcaacaataaactgctaaacctcgatactaccaatacaattaatataaaaaaagagtccgtggcaaacggactctttttttcaccaaagtaagaactactcatcgtatgtttactttgataagaatgatttctagtcaagaatacttggtttcaaatatcttgtcaattcctttagacttaaaagttttttttcgctggttcaaccaccaagtaccgataaggctcgtcaccttcagagtgtgtttgtatttgggcatccttacttaatgcagaatggatttgctttctttcaaaagctggcataggttctaaaaagactggtctacctgtgcgtttaactttttctgctgttctattggccagacgctctaaaattgcctgacgcttttcacgataatcacctacattaacaaccacggatagcttatttgctgcgattcgatgaatatatacttgtgccagatattgtaaagcatttagtgtttttccatgttttccaatcaggagtccttgcttttgtgtatctagatgaaaaacgatcaagccatcttctcgtgctgtttttacaagggctggtgcattcaatgctttagaaatgttagtcaaatataaagcaagatgagtaagtgcttcatcatcagaaagatcctttgcgttaggtttttcttccgtatctgcttgcgattttgcagtaagcactgattcctcaagttcaggttctaagatttcttcaattatttcagttactgattctgtgatgatttttgattcatccgcagcacttctttcaattgatacgcgggcattctttttaccaatacccaaaaaaccttttttcccctcatccaaaacctcgatcactgcttgatccttgtttaaacctaaagcatgcaatccttcttggatagcttcatctactgtaagaccttcataaatcggcattatctgcaacctccttttatttcttacgttttttcttaggactcattgctttcttcagcgctctttctcgttctctttcttttcgagcagcttcttctctttcttgacgaatcttgaatggattattcaaaatcaacgtttgtactacttggaatgcattggatacaacccagtataaagataaaccactagcgatattgatccccatcaataaaatcatcaatggcattgcaaaattcattatctttaaactagcatttgattctatttgactcatactagacaaataagtacttgcaaatgtaaatagtgcagctaatataggtaaaataaagtaaggatctcggtcccctaattgtaaccacaaaaattttccttcttgtaaagctggaacccgcgaaatcgattgccataatgccatcaaaattggcatttggacaagtagcggcaaacatccggcataaggattcacattattttctgcataaagccgttgcgtttctgcacgtaatttattttgtgtttcactatctttcgatgcatattgttgttgcagagcttttaattttggctgcaattcttgagtttttcgcatactctttgtttgaaaatgcattaaaggcatgagaataatccgaatgatcagagtaaatagaatgatcccaatcccagcattgccaaaagatagcatcttgatcgcttcagcaaagtaataaacgatataacgatcccataatcctgaactttgcgcattcacttccccagttgcgctacaggcagacaagacaactaccaatgagacgatccccaaaaatagtaagatacgttttccttttttcacttaaataattcctttccgttagttaatgattttagcaagctttaacacatgctctaaattcgagtatacttcttgagaagagcaattcgaaacacttggacgagcaattacgatgaaatcgagtgtaggtttgattctaggttgcatatccgtgagacttgctctgatttttcgtttgatctcatttcgtttaacagcatttcctactttttttcctacagataatccgacacgaaaatgtggctgatctttctgcagaacatagacaacaaatttacggtttgcaaaagactttcctttctgaaaaaccttttgaaagtcttgttctgtttttacgcgatatgcctttctcatcttggttccttcatttctttctactttggttactcacctgtcaataataccatatttagtaaaagggattcactatattccttaaaaaacggcataaaaaaaaccactggcattcagtggcttatgcagaaataacctttctgcctttacgacgacgacttgctaaaacacgacgtccattttttgtactcatacgtttacggaatccgtgaactttttgacgtttacgtttatttggttgataagttcttttcatttagtgacacctccatcaaaataatgattatgcgcatagacatactttgatagtataacgagtcagacagtgttttgtcaatataaaattcacccactttactgtcttgttttccacataaactaaatgaactgtgtgttacttgtggattttgcatttttgtggataacttatttccacaagtttttcctgctttttccacaaataaacacccttctaaaaagttatccacatacacttttctagctgtgcataaatcagtaaaatgcttttacatcaacgtatttgattaacagttacttgtggataaacaagagattattgtaacaatccacaaacactcctcctctgtggataaccgtaaatttgataagttaatttctcctgttcttttttccatagatgtggaaaagtatttttttctaaccttttttattataatctgtggaaaacttcttccatccgtgctaaattagtattatctattcttagctataggaggacaattt
